(19) United States
(12) Patent Application Publication
(10) Pub. No.: US 2013/0086705 A1
(43) Pub. Date: Apr. 4, 2013

(54) COMPOSITIONS AND METHODS FOR REDUCING AND DETECTING VIRAL INFECTION

(71) Applicants: Michael David, San Diego, CA (US); Manqing Li, San Diego, CA (US)

(72) Inventors: Michael David, San Diego, CA (US); Manqing Li, San Diego, CA (US)

(73) Assignee: The Regents of the University of California

(21) Appl. No.: 13/624,153

(22) Filed: Sep. 21, 2012

Related U.S. Application Data
(60) Provisional application No. 61/540,738, filed on Sep. 29, 2011.

(51) Int. Cl. C12N 5/07

(52) U.S. Cl. CPC C12N 5/06
USPC 800/11; 514/44 A; 435/7.9; 435/5; 435/6.11; 435/455; 435/325

(57) ABSTRACT

The invention provides methods and compositions for screening candidate compounds for activity in altering the level of expression of Schlafen (Slfn) in cells, tissues and animals. The invention also provides methods and compositions for screening candidate compounds for activity in altering the level of virus infection. The invention further provides methods and compositions for screening candidate compounds for altering the level of expression of virus proteins without substantially unfaltering the level of expression of cellular proteins. The invention additionally provides methods and compositions for diagnosing the risk and/or susceptibility to virus infection. The invention also provides transgenic non-human animals, and transgenic cells, comprising a mutant Schlafen (Slfn) gene, such as a knockout mutation. These invention's compositions and methods are useful as models for virus infection, and for screening candidate prophylactic and/or therapeutic anti-viral compounds.

### CROSS-REFERENCE TO RELATED APPLICATIONS

[0001] This application claims priority under 35 U.S.C. §119(e) to co-pending U.S. Provisional Application Ser. No. 61/540,738 filed on Sep. 29, 2011, herein incorporated by reference in its entirety.

### GOVERNMENT INTEREST

[0002] This invention was made with government support under grant numbers AI047182, AI81019, AI074967, P01AI090935, R01GM101982, R21AI088490, P30AI36214, and P01AI090935 awarded by the National Institutes for Health (NIH). The government has certain rights in the invention.

### FIELD OF THE INVENTION

[0003] The invention provides methods and compositions for screening candidate compounds for activity in altering the level of expression of Schlafen (Slfn) in cells, tissues and animals. The invention also provides methods and compositions for screening candidate compounds for activity in altering the level of virus infection. The invention further provides methods and compositions for screening candidate compounds for altering the level of expression of virus proteins without substantially altering the level of expression of cellular proteins. The invention additionally provides methods and compositions for diagnosing the risk and/or susceptibility to virus infection. The invention also provides transgenic non-human animals, and transgenic cells, comprising a mutant Schlafen (Slfn) gene, such as a knockout mutation. These invention's compositions and methods are useful as models for virus infection, and for screening candidate prophylactic and/or therapeutic anti-viral compounds.

### SUMMARY OF THE INVENTION

[0004] The invention provides a method for reducing release of a retrovirus from a cell infected with the retrovirus, comprising administering to the infected cell a composition comprising an amount of a Slfn protein, or portion of the Slfn protein, wherein the amount is effective in reducing release of the retrovirus. In one embodiment, the Slfn protein comprises mammalian Slfn11 protein. In a particular embodiment, the mammalian Slfn11 protein comprises human slfn11 protein. In another embodiment, the amount does not substantially reduce release of a DNA virus. In a further embodiment, the DNA virus is selected from adenoassociated virus (AAV) and Herpes Simplex virus (HSV).

[0005] The invention also provides a method for reducing viral infection in a subject in need thereof comprising administering to the subject a therapeutically effective amount of a composition comprising Slfn protein, or portion of the Slfn protein.

[0006] Also provided by the invention is a method for detecting retrovirus infection in a cell comprising detecting Slfn produced by the cell.

[0007] The invention provides methods and compositions for screening candidate compounds for activity in altering the level of expression of Schlafen (Slfn) in cells, tissues and animals. The invention also provides methods and compositions for screening candidate compounds for activity in altering the level of virus infection. The invention further provides methods and compositions for screening candidate compounds for altering the level of expression of virus proteins without substantially altering the level of expression of cellular proteins. The invention additionally provides methods and compositions for diagnosing the risk and/or susceptibility to virus infection. The invention also provides transgenic non-human animals, and transgenic cells, comprising a mutant Schlafen (Slfn) gene, such as a knockout mutation. These invention's compositions and methods are useful as models for virus infection, and for screening candidate prophylactic and/or therapeutic anti-viral compounds.

[0008] In one embodiment, the invention provides a method for screening one or more candidate compounds for activity in altering the level of expression of Schlafen (Slfn) in a mammalian target cell, comprising a) contacting the one or more candidate compounds with a mammalian target cell that expresses Schlafen (Slfn) to produce a contacted cell, and b) measuring the level of expression of one or more Slfn in the contacted cell and the uncontacted target cell. In a particular embodiment, an altered level of expression of one or more Slfn in the contacted cell compared to in the uncontacted target cell identifies the one or more candidate compounds as having activity in altering the level of expression of Slfn in the uncontacted target cell.

[0009] The invention further provides a method for screening one or more one or more candidate compounds for activity in altering the level of virus infection of a mammalian host cell, comprising a) providing i) a virus, ii) a mammalian host cell that is susceptible to the virus, and iii) the one or more candidate compounds, b) contacting the mammalian host cell with the virus and with the one or more candidate compounds under conditions for infection of the mammalian host cell with the virus, to produce a test contacted cell, c) contacting the mammalian host cell with the virus, in the absence of the one or more candidate compounds, under conditions for infection of the transgenic mammalian cell with the virus, to produce a control contacted cell, and d) measuring the level of virus infection of the test contacted cell and of the control contacted host cell. In one embodiment, an altered level of infection of the contacted test cell compared to the control contacted cell identifies the one or more candidate compounds as having activity in altering the level of virus infection of the host cell. In particular embodiments, the method comprises detecting a reduction of from 20% to 100% in the level of the virus infection of the test contacted cell compared to the control contacted cell. In alternative embodiments, the method further comprises measuring the level of expression of one or more Slfn in one or more of the host cell, the test contacted cell, and the control contacted cell.

[0010] Also provided by the invention is a method for screening one or more candidate compounds for altering the level of expression of one or more virus proteins, comprising a) providing i) a first cell that expresses a first heterologous nucleotide sequence encoding a heterologous polypeptide, wherein the first heterologous nucleotide sequence is optimized for gene expression based on codon bias of the virus, ii) a second cell that expresses a second heterologous nucleotide sequence encoding the heterologous polypeptide, wherein the second heterologous nucleotide sequence is optimized for gene expression based on codon bias of a cell that is permissive to the virus, and iii) the one or more candidate compounds, b) contacting the one or more candidate compounds with the first cell to produce a first contacted cell, c) contacting the one or more candidate compounds with the second cell to produce a second contacted cell, and d) measuring the level of expression of the heterologous polypeptide in the first contacted cell and in the second contacted cell. In one embodiment, measuring an altered level of expression of the heterologous polypeptide in the first contacted cell and measuring a substantially unaltered level of expression of the heterologous polypeptide in the second contacted cell identifies the one or more candidate compounds as specifically altering the level of expression of one or more proteins of the virus. In another embodiment, the one or more candidate compounds comprise a test polypeptide sequence that is encoded by a nucleic acid sequence comprised in the first cell and in the second cell, and the contacting step comprises expressing the test polypeptide sequence by the first cell and by the second cell. In a further embodiment, the test polypeptide sequence comprises Schlafen (Slfn).

[0011] The invention additionally provides a method for identifying one or more Schlafen (Slfn) polymorphisms as altering the level of risk of a subject to infection by a virus, comprising a) providing i) a first sample comprising genomic Schlafen (Slfn) sequence from a first population of subjects infected by the virus, and ii) a second sample comprising genomic Schlafen (Slfn) sequence from a second population of subjects not infected by the virus, b) determining the presence of i) wild type Schlafen (Slfn) gene sequence in the first sample and in the second sample, and ii) one or more Schlafen (Slfn) polymorphisms in the first sample and in the second sample, c) measuring the ratio of the one or more Schlafen (Slfn) polymorphisms relative to the wild type Schlafen (Slfn) gene sequence in i) the first sample, and ii) in the second sample, wherein measuring a difference in the ratio in the first sample relative to the ratio in the second sample identifies the one or more Schlafen (Slfn) polymorphisms as altering the level of risk of the mammalian subject to infection by the virus.

[0012] Also provided herein is a method for determining the risk of a mammalian subject to infection by a virus, comprising detecting, in a biological sample that comprises genomic Schlafen (Slfn) sequence from the subject, one or more Schlafen (Slfn) polymorphisms that is identified by any one or more of the methods described herein. In a particular embodiment, the detecting step comprises detecting an increased ratio of the one or more Schlafen (Slfn) polymorphisms in the subject.

[0013] The invention additionally provides a method for identifying one or more Schlafen (Slfn) as altering the level of risk of a subject to infection by a virus, comprising measuring the level of expression of one or more Schlafen (Slfn) in i) a first sample from a first population of subjects infected by the virus, and ii) a second sample from a second population of subjects not infected by the virus, wherein measuring an altered level of expression in the first sample relative to the second sample, identifies the one or more Schlafen (Slfn) as altering the level of risk of the subject to infection by the virus.

[0014] Also provided by the invention is a method for determining the risk of a mammalian subject to infection by a virus, comprising detecting in a biological sample from the subject an altered level of expression of one or more Schlafen (Slfn) identified by any one or more of the methods described herein.

[0015] The invention additionally provides a method for altering the level of expression of one or more virus protein by a target mammalian cell that is susceptible to a virus, comprising administering to the cell one or more compounds in an amount that alters the level of expression of one or more Schlafen (Slfn) in the cell. In one embodiment, the method comprises measuring the level of expression of the one or more Schlafen (Slfn) in the cell. In another embodiment, the one or more compounds that alter the level of expression of the Slfn in the target mammalian cell is identified by any one or more of the methods described herein. In a particular embodiment, the cell is in vivo in a mammalian subject. In a preferred embodiment, the method further comprises measuring the level of expression of the one or more virus proteins.

[0016] Also provided by the invention is a transgenic non-human mammal comprising a homozygous deletion of at least a portion of one or more Schlafen (Slfn) gene, wherein the deletion is comprised in one or more of CD4+ T cell, macrophage cell, and dendritic cell of the mammal. In one embodiment, the at least a portion encodes from amino acid 1 to 579 of a Slfn protein. In another embodiment, the at least a portion encodes a polypeptide sequence that is at least 50-amino acids long and that is comprised by the sequence from amino acid 1 to 579 of a Slfn protein. In a further embodiment, the transgenic non-human mammal is susceptible to infection by human immunodeficiency virus (HIV). In another embodiment, the transgenic non-human mammal exhibits one or more symptoms of Acquired Immune Deficiency Syndrome (AIDS).

[0017] The invention further provides a method for screening one or more one or more candidate compounds for activity in altering the level of infection of a mammalian host cell by human immunodeficiency virus (HIV), comprising a) providing i) human immunodeficiency virus (HIV), ii) any one or more of the transgenic non-human mammals described herein, and iii) the one or more candidate compounds, b) contacting the transgenic non-human mammal with the HIV and with the one or more candidate compounds under conditions for infection of cells of the mammal with the HIV to produce a contacted test mammal, c) contacting the transgenic non-human mammal with the HIV, in the absence of the one or more candidate compounds, under conditions for infection of cells of the mammal with the HIV to produce a contacted control mammal, and d) measuring the level of HIV infection of cells of the contacted test mammal and of cells of the contacted control mammal, wherein measuring an altered level of HIV infection of the cells of the contacted test mammal compared to the cells of the contacted control mammal identifies the one or more candidate compounds as having activity in altering the level of the HIV infection of the host cell.

[0018] Also provided by the invention is a transgenic non-human mammalian cell comprising a deletion of Schlafen (Slfn) gene.

[0019] The invention further provides a method for screening one or more one or more candidate compounds for activity in altering the level of infection of a mammalian cell by a virus, comprising a) providing i) virus, ii) one or more of the transgenic mammalian cells described herein, and iii) the one or more candidate compounds, b) contacting the transgenic mammalian cell with the virus and with the one or more candidate compounds under conditions for infection of the transgenic mammalian cell with the virus to produce a contacted test cell, c) contacting the transgenic mammalian cell with the virus, in the absence of the one or more candidate compounds, under conditions for infection of the transgenic mammalian cell with the virus to produce a contacted control cell, and d) measuring the level of infection of the contacted test cell and of the contacted control cell with the virus, wherein measuring an altered level of virus infection of the contacted test cell compared to the contacted control cell identifies the one or more candidate compounds as having activity in altering the level of infection of the mammalian cell by the virus. In one embodiment, the one or more candidate compounds are identified by any one or more of the methods described herein.

### BRIEF DESCRIPTION OF THE DRAWINGS

[0020] FIG. 1: Domain structure of murine Slfn proteins.

[0021] FIG. 2: huSlfn11 inhibits retrovirus production: HEK293T cells were co-transfected with plasmids encoding V5-tagged huSlfns (wt or mutants) or the CAT control, pCL-Eco retrovirus packaging plasmid (Gag, Pol, Env) and MIG (MSCV-IRES-GFP) plasmid. The supernatant was collected and used to infect NIH3T3 cells at serial dilutions. 48 hours after infection, the cells were harvested and the number of GFP⁺ NIH 3T3 cells was determined by FACS.

[0022] FIG. 3: huSlfn11 inhibits retrovirus production: HEK293; HEK293-Slfn11^{shRNA}, HEK293-Control^{shRNA}, or HEK293T cells were transfected with MSCV-IRES-GFP plasmid and the pCL-Eco helper virus construct to produce mouse-tropic retrovirus. Virus containing culture supernatants were collected and used to infect NIH3T3 cells. Cells were harvested 48 h after infection and the number of GFP⁺ NIH3T3 cells was determined by FACS. It should be noted that neither plasmid contained an SV40 origin of replication.

[0023] FIG. 4: huSlfn11 inhibits HIV production: HEK293; HEK293-Slfn11^{shRNA}, HEK293-Control^{shRNA}, or HEK293T cells were co-transfected with pCMV-VSV-g Env and pNL43LucR+E− HIV plasmids (see below) and pcDNA5-GFP vector. The supernatants were collected, and virus titers were determined by luciferase assays of target cells infected by serially diluted supernatants. The titer was normalized to the number of GFP⁺ virus-producing cells to account for minor differences in transfection efficiency between the cell lines.

[0024] FIG. 5: huSlfn11 does not significantly affect intracellular vRNA levels: The indicated cells were co-transfected with pNL43LucR+E− HIV and pcDNA5-GFP plasmid (no pCMV-VSV-g Env), after 48 hrs cells were collected and total RNA was extracted. The amount of viral RNA was determined by qPCR with primers for the luciferase sequence. Viral RNA levels were normalized to the number of GFP⁺ cells to account for minor variations (<2%) in transfection efficiency between cells.

[0025] FIG. 6: hSlfn11 does not inhibit infection by retrovirus: VSVg-pseudotyped HIV carrying luciferase (see FIG. 5) was isolated from virus producing cells, and used to infect HEK293; HEK293-Slfn11^{shRNA}, HEK293-Control^{shRNA}, or HEK293T cells. The cells were collected 48 hrs post transfection, and luciferase activity was determined (normalized to total protein).

[0026] FIG. 7: huSlfn11 selectively inhibits viral protein expression based on codon usage preference. A) 293T cells were transfected with HIV-1 pNL4-3.Luc.R⁺E⁻ vector and pcDNA5 EGFP together with plasmids encoding either huSlfn5, huSlfn11 or CAT as indicated. The expression of the indicated HIV-derived proteins and of EGFP and GAPDH were detected by immunoblotting of whole cell lysates. B) Top panels: 293T cells were co-transfected with HIV-1 pNL4-3.Luc.R⁺E⁻ vector and either huSlfn5, huSlfn11 or CAT as indicated (left panels), or 293, 293shRNA^{Ctl} and 293shRNA^{Slfn} cells were transfected with HIV-1 pNL4-3.Luc.R⁺E⁻ vector (right panels). Total cell lysates were probed for the presence of luciferase and GAPDH by immunoblotting. Bottom panels: Same as above, except pNL4-3-DEnv-EGFP was used instead of pNL4-3.Luc.R⁺E⁻, and the resulting lysates were immunoblotted for Nef and GAPDH.

[0027] FIG. 8: huSlfn11 selectively inhibits viral protein expression based on codon usage. Indicated cells were transfected with V5-tagged viral codon usage-based gag (Gag^{vir}, top) or synonymous human codon optimized gag (Gag^{opt}, bottom). Expression levels of Gag were determined by anti-V5 immunoblotting.

[0028] FIG. 9: huSlfn11 inhibits viral expression based on codon usage. A) 293shRNA^{Ctl} and 293shRNA^{Slfn} cells were transfected with V5-tagged GFP or EGFP vectors with or without HIV-1 pNL4-3.Luc.R⁺E⁻ vector, and the expression of (E)GFP and GAPDH was detected by immunoblotting B) To account for minor differences (<2 fold) in (E)GFP mRNA levels, (E)GFP proteins and mRNAs were quantitated from three experiments as outlined above, and GFP and EGFP protein levels were normalized to their respective mRNAs.

[0029] FIG. 10: The AAA+ motifs of Slfn family members.

[0030] FIG. 11: huSlfn11 binds tRNA: Total tRNA was ³²P end-labeled, and used as probe in EMSAs utilizing decreasing amounts (3.5, 0.7 or 0.15 μg) FPLC-purified 6×His-huSlfn11N, or 6×His-GFP.

[0031] FIG. 12: HIV/huSlfn11 change tRNA pool: Total tRNA from 293shRNA^{Ctl} and 293shRNA^{Slfn} with or without pNL4-3.Luc.R⁺E⁻ vector was analyzed by tRNA-array (1).

[0032] FIG. 13: huSlfn11 inhibits HIV replication. A) HumanPBMCs were treated with 1,000 U/ml IFNβ, and Slfn11 expression analyzed by immunoblotting B) huSlfn11 levels in CEM, CEMshRNA^{Ctl} and CEMshRNA^{Slfn} cells were analyzed by immunoblotting with anti-huSlfn11 antibodies. C) CEM, CEMshRNA^{Ctl} and CEMshRNA^{Slfn} cells were infected with HIV-1_{LAI} at an MOI of 0.01. The extent of viral replication was determined by HIV p24 ELISA of culture supernatants at indicated time points.

[0033] FIG. 14-huSlfn11 inhibits retrovirus production without affecting intracellular vRNA levels. 293T cells were transfected with pNL4-3.Luc.R⁺E⁻/pCMV-VSV-G together with huSlfn5, huSlfn11, huSlfn11N, huSlfn11C or CAT (a, c, e, g), or 293, 293shRNA^{Ctl}, 293shRNA^{Slfn} and 293T cells were transfected with pNL4-3.Luc.R⁺E⁻ and pCMV-VSV-G (b, d, f, h). a, b) VSV-G-pseudotyped HIV production was assayed by titrated infection and luciferase assay; c, d) Viral particle content in supernatants was analyzed by p24 ELISA; e) and f) extracellular vRNA concentration was analyzed by qPCR of p24; g) and h) intracellular vRNA was determined by qPCR of p24. (avg+/−s.d.; n=3)

[0034] FIG. 15—huSlfn11 selectively inhibits viral protein expression based on codon usage. a) 293T cells were transfected with pNL4-3.Luc.R⁺E⁻ and pcDNA5-EGFP together with huSlfn5, huSlfn11 or CAT, and cell lysates immunoblotted for HIV proteins, EGFP and GAPDH; b) 293, 293shRNA^{Ctl} and 293shRNA^{Slfn} cells were transfected with pNL4-3.Luc.R⁺E⁻ and pcDNA5-EGFP, and lysates analyzed as in a); c) Top: 293T cells were co-transfected with pNL4-3.Luc.R⁺E⁻ and huSlfn5, huSlfn11 or CAT (left), or 293, 293shRNA^{Ctl} and 293shRNA^{Slfn} cells were transfected with pNL4-3.Luc.R⁺E⁻ (right). Lysates were probed for luciferase and GAPDH. Bottom: as above, except pNL4-3-DEnv-EGFP was used instead of pNL4-3.Luc.R⁺E⁻, and lysates immunoblotted for Nef and GAPDH; d) Cells were transfected with viral codon usage-based gag (Gag^{vir}, top) or synonymous human codon usage-optimized gag (Gag^{opt}, bottom). Expression of Gag in cell lysates was determined by anti-V5 immunoblotting.

[0035] FIG. 16-huSlfn11 binds tRNAs and selectively inhibits protein expression based on codon usage. a) 293shRNA^{Ctl} and 293shRNA^{Slfn} cells were transfected with pNL4-3.Luc.R⁺E⁻ or control vector (indicated as +/−HIV). Relative abundances of mature tRNA species were analyzed by microarray as described^{25,26}; b) Left: increasing amounts of huSlfn11N or GFP were incubated with ³²P-labelled tRNA and subject to EMSA. Right: 2× or 10× unlabeled tRNA or in-vitro transcribed vRNA corresponding to the gag-pol frame-shifting sequence (120b) were added to the binding reaction; c) As in b), except non-specific (NS) or anti-huSlfn11 (□S11) monoclonal antibody was added to the binding reaction; d) 293T cells were transfected with V5-tagged GFP, Myc-tagged EGFP and pNL4-3.Luc.R⁺E⁻ together with either CAT, huSlfn5, or huSlfn11 (left). Lysates were probed for V5-GFP, Myc-EGFP and GAPDH. Similarly, V5-tagged GFP, Myc-tagged EGFP and pNL4-3.Luc.R⁺E⁻ were co-transfected into 293, 293shRNA^{Ctl} and 293shRNA^{Slfn} cells (right), and V5-GFP, Myc-EGFP and GAPDH expression determined by immunoblotting. e) V5-GFP and Myc-EGFP protein levels of d) were quantitated, and normalized to V5-GFP and Myc-EGFP mRNA levels, respectively (avg+/−s.d.; n=4).

[0036] FIG. 17-huSlfn11 inhibits replication of wild-type HIV-1_{LAI} in CEM cells. a) Human PBMCs were stimulated with 6,000 U/ml IFNβ. huSlfn11 expression in the derived lysates and in CEM cell lysates was analyzed by immunoblotting. b) huSlfn11 expression in CEM, CEMshRNA^{Ctl} and CEMshRNA^{Slfn} cells as analyzed by immunoblotting; c) CEM, CEMshRNA^{Ctl} and CEMshRNA^{Slfn} cells were infected with HIV-1_{LAI} at an MOI of 0.01, and viral replication was assayed by p24 ELISA of culture supernatants (avg+/−s.d.; n=4).

[0037] FIG. 18—Relative expression and inducibility of huSlfns. a) Human HFF cells were stimulated with IFNβ (5000 U/μl), pdAdT (1 μg/ml) or pC (1 pg/ml) for 6 hours, and levels of the indicated mRNAs and TBP were determined by qPCR. The expression of the Slfn and ISG54 mRNAs are presented as ΔCt between TBP and the Slfn mRNA of interest. b) Total cellular RNA was prepared from the indicated cell lines, and mRNA levels of the huSlfns and of TBP were quantitated by qPCR and presented as in a). c) huSlfn11 mRNA levels in 293, 293shRNACtl, 293shRNASlfn and 293T cells as determined by qPCR; d) Same as c), except huSlfn11 protein was visualized by immunoblotting of whole cell lysates.

[0038] FIG. 19—huSlfn11 does not inhibit early viral infection steps. a) 293, 293shRNACtl, 293shRNASlfn and 293T cells were infected with pseudotyped HIV-1VSV-G virus at the indicated dilutions, and infection efficiency was determined by the expression levels of the transduced luciferase in the infected cells.

[0039] FIG. 20—huSlfn11 inhibits production of MSCV but not AAV. a) 293, 293shRNACtl, 293shRNASlfn and 293T cells were transfected with MSCV-IRES-GFP retrovirus vector and pCL-Eco ecotropic retrovirus packaging vector. Viral titers in the supernatants were determined by infection and subsequent flow-cytometric analysis of GFP expression of NIH3T3 cells. b) 293T cells were transfected with MSCV-IRES-GFP retrovirus vector/pCL-Eco packaging vector and plasmids encoding either huSlfn5, huSlfn11, huSlfn11N, huSlfn11C or CAT as indicated. Virus production was assayed by titrated infection of NIH3T3 cells as in a). c) 293, 293shRNACtl, 293shRNASlfn and 293T cells were transfected with pXX6, pXX2 and pACLALuc, and rAAVLuc production determined by luciferase assay following titrated infection.

[0040] FIG. 21—huSlfn11 does not alter cytoplasmic vRNA levels or cause accumulation of viral particles. a) 293T cells were transfected with pNL4-3.Luc.R+E− together with either huSlfn5, huSlfn11 or CAT. After cellular fractionation, cytoplasmic vRNA concentration was analyzed by qPCR; b) 293T cells were transfected with HIV-1 pNL4-3.Luc.R+E− vector together with pcDNA6-CAT or pcDNA6-Slfn11. 48 hours later, the cells were fixed and images were acquired by electronic microscopy.

[0041] FIG. 22—huSlfn11 inhibition is independent of viral enzymes or nuclear export of unspliced RNA. a) 293T cells were co-transfected with HIV-1 pNL4-3.Luc.R+E−PRstop vector and either huSlfn5, huSlfn11 or CAT as indicated (left panels), or 293, 293shRNACtl and 293shRNASlfn cells were transfected with pNL4-3.Luc.R+E−PRstop vector (right panels). Whole cell lysates derived 48 hours after transfection were immunoblotted with anti-Gag and anti-GAPDH antibodies. b) 293T cells were transfected with psPAX2 (encoding Gag, Pol, Tat & Rev without any LTR elements) and pNL-GFP-RRE(SA) (providing spliceable RNA yielding GFP only if exported as unspliced RNA via Rev/RRE interaction) together with plasmids encoding either huSlfn5, huSlfn11, huSlfn11N, huSlfn11C or CAT as indicated. Whole cell lysates were immunoblotted with anti-GFP, anti-Gag and anti-GAPDH antibodies.

[0042] FIG. 23—Non-discriminating tRNA-binding of huSlfn11. Gel purified 32P-labeled total tRNA was incubated with increasing amounts of huSlfn11N to obtain approximate 50% shifting on a native gel. 32P-labeled tRNA from shifted and unshifted bands was recovered and samples hybridized on microarrays containing 96 probes (probes are repeated 8 times each and are complementary to human/mouse nuclear-encoded and mitochondrial-encoded tRNAs).

[0043] FIG. 24—huSlfn11 inhibits HIV replication. The pLKO.1 shRNA vector against Slfn11 (TRCN0000152057, CCGGCAGTCTTTGAGAGAGCTTATTCT-CGAGAATAAGCTCTCTCAAAGACTGTTTTTTG) was used to independently create a second huSlfn11-deficient CEM cell line (CEMshRNASlfn in this figure). CEM, CEMshRNACtl and the new CEMshRNASlfn cells were infected with HIV-1LAI at an MOI of 0.01. The extent of viral replication was determined by HIV p24 ELISA of culture supernatants at indicated time points.

[0044] FIG. 25—Amino acid sequence of exemplary Slfn proteins listed in Table 1.

### DEFINITIONS

[0045] To facilitate understanding of the invention, a number of terms are defined below.

[0046] The term “recombinant DNA molecule” as used herein refers to a DNA molecule that is comprised of segments of DNA joined together by means of molecular biological techniques.

[0047] The term “recombinant protein” or “recombinant polypeptide” as used herein refers to a protein molecule that is expressed using a recombinant DNA molecule.

[0048] The term “recombinant mutation” refers to a mutation that is introduced by means of molecular biological techniques. This is in contrast to mutations that occur in nature.

[0049] The terms “endogenous” and “wild type” when in reference to a sequence refer to a sequence which is naturally found in the cell or virus into which it is introduced so long as it does not contain some modification relative to the naturally-occurring sequence. The term “heterologous” refers to a sequence that is not endogenous to the cell or virus into which it is introduced.

[0050] The terms “mutation” and “modification” refer to a deletion, insertion, or substitution.

[0051] A “deletion” is defined as a change in a nucleic acid sequence or amino acid sequence in which one or more nucleotides or amino acids, respectively, is absent.

[0052] An “insertion” or “addition” is that change in a nucleic acid sequence or amino acid sequence that has resulted in the addition of one or more nucleotides or amino acids, respectively.

[0053] A “substitution” in a nucleic acid sequence or an amino acid sequence results from the replacement of one or more nucleotides or amino acids, respectively, by a molecule that is a different molecule from the replaced one or more nucleotides or amino acids. For example, a nucleic acid may be replaced by a different nucleic acid as exemplified by replacement of a thymine by a cytosine, adenine, guanine, or uridine. Alternatively, a nucleic acid may be replaced by a modified nucleic acid as exemplified by replacement of a thymine by thymine glycol. Substitution of an amino acid may be conservative or non-conservative. “Conservative substitution” of an amino acid refers to the replacement of that amino acid with another amino acid which has a similar hydrophobicity, polarity, and/or structure. For example, the following aliphatic amino acids with neutral side chains may be conservatively substituted one for the other: glycine, alanine, valine, leucine, isoleucine, serine, and threonine. Aromatic amino acids with neutral side chains which may be conservatively substituted one for the other include phenylalanine, tyrosine, and tryptophan. Cysteine and methionine are sulphur-containing amino acids which may be conservatively substituted one for the other. Also, asparagine may be conservatively substituted for glutamine, and vice versa, since both amino acids are amides of dicarboxylic amino acids. In addition, aspartic acid (aspartate) may be conservatively substituted for glutamic acid (glutamate) as both are acidic, charged (hydrophilic) amino acids. Also, lysine, arginine, and histidine may be conservatively substituted one for the other since each is a basic, charged (hydrophilic) amino acid. “Non-conservative substitution” is a substitution other than a conservative substitution. Guidance in determining which and how many amino acid residues may be substituted, inserted or deleted without abolishing biological and/or immunological activity may be found using computer programs well known in the art, for example, DNAStar™ software.

[0054] A “variant” or “homolog” of an amino acid sequence of interest or nucleotide sequence of interest refers to a sequence that has at least 99% identity and/or at least 95% identity and/or at least 90% identity and/or at least 85% identity and/or at least 80% identity and/or at least 75% identity and/or at least 70% identity and/or at least 65% identity with the an amino acid sequence of interest or nucleotide sequence of interest.

[0055] The term “expression vector” as used herein refers to a recombinant DNA molecule containing a desired coding sequence and appropriate nucleic acid sequences necessary for the expression (e.g., transcription and/or translation) of the operably linked coding sequence in a particular host organism. Expression vectors are exemplified by, but not limited to, plasmid, phagemid, shuttle vector, cosmid, virus, chromosome, mitochondrial DNA, plastid DNA, and nucleic acid fragment. Nucleic acid sequences used for expression in prokaryotes include a promoter, optionally an operator sequence, a ribosome binding site and possibly other sequences. Eukaryotic cells are known to utilize promoters, enhancers, and termination and polyadenylation signals.

[0056] “Purify” and grammatical equivalents thereof when in reference to a desirable component (such as cell, protein, nucleic acid sequence, carbohydrate, etc.) refer to the reduction in the amount of at least one undesirable component (such as cell, protein, nucleic acid sequence, carbohydrate, etc.) from a sample, including a reduction by any numerical percentage of from 5% to 100%, such as, but not limited to, from 10% to 100%, from 20% to 100%, from 30% to 100%, from 40% to 100%, from 50% to 100%, from 60% to 100%, from 70% to 100%, from 80% to 100%, and from 90% to 100%. Thus purification results in “enrichment” (i.e., an increase) in the amount of the desirable component relative to one or more undesirable component.

[0057] “Isolated” and grammatical equivalents thereof when in reference to a desirable component (such as cell, protein, nucleic acid sequence, carbohydrate, etc.) refer to a component that is chemically cleaved from a native element, molecule, or structure and/or is chemically synthesized such that the “isolated” component is one that does not exist as in nature, and/or has a distinctive chemical identity from that of the native element, molecule, or structure to make the component markedly different from the one that exists in nature.

[0058] The terms “operable combination” and “operably linked” when in reference to the relationship between nucleic acid sequences and/or amino acid sequences refers to linking the sequences such that they perform their intended function. For example, operably linking a promoter sequence to a nucleotide sequence of interest refers to linking the promoter sequence and the nucleotide sequence of interest in a manner such that the promoter sequence is capable of directing the transcription of the nucleotide sequence of interest resulting in an mRNA that directs the synthesis of a polypeptide encoded by the nucleotide sequence of interest. The term also refers to the linkage of amino acid sequences in such a manner so that a functional protein is produced.

[0059] The term “infection” of a cell by a virus refers to the level of the virus at any one or more stage of its life cycle (e.g., viral fusion with the cell to gain entry, replication of virus genomic DNA and/or RNA, transcription of virus genomic DNA into RNA, translation of genomic sequences into virus proteins, assembly of virus proteins into virus particles, and/or release of virus particles from the cell), as determined, directly or indirectly, by any method. For example, cell infection by HIV may be determined by, without limitation, in vitro cell-cell fusion assays using the exemplary HeLa-P5L and HeLa-ADA cell lines, in vitro HIV infection assays using peripheral blood mononuclear cells (PMBC), and/or in vivo HIV infection assays in animals, such as humanized mouse models and macaque models.

[0060] A “susceptible” cell refers to a cell that is capable of being infected by a virus. “Infection” refers to adsorption of the virus to the cell and penetration into the cell. Susceptible cells include permissive and non-permissive cells. Susceptibility of a cell to a virus may be determined by detecting the presence of virus proteins and/or virus RNA and/or virus DNA in extracts of infected cells.

[0061] A “permissive” cell refers to a cell that is both susceptible to a virus and capable of supporting replication of viral nucleic acid sequences and/or viral peptide sequences. While not required, in one embodiment, a cell is permissive if the replicated viral nucleic acid sequences and viral peptide sequences are assembled into a virion particle. In some embodiments, a permissive cell releases the assembled virions contained therein. In other embodiments, the assembled virions remain inside the permissive cells without release. Viral replication may be determined by, for example, production of viral nucleic acid sequences and/or of viral peptide sequences. Production of progeny virus may be determined by observation of a cytopathic effect. However, this method is less preferred than detection of virus nucleotide sequences and/or virus protein sequences, since a cytopathic effect may not be observed even when viral replication is detectable by detecting virus nucleotide sequences and/or virus protein sequences.

[0062] A cell that is “not permissive” (i.e., “non-infections”) is a cell that is not capable of supporting viral replication.

[0063] The terms “immortalized cell” and “cell line” interchangeably refer to a cell that is capable of a greater number of cell divisions in vitro before cessation of proliferation and/or senescence as compared to a primary cell from the same source. Cell lines may be produced by passaging of cells using methods known in the art. Briefly, a confluent or subconfluent population of cells which is adhered to a solid substrate (e.g., plastic Petri dish) is released from the substrate (e.g., by enzymatic digestion), and a proportion (e.g., 10%) of the released cells is seeded onto a fresh substrate. The cells are allowed to adhere to the substrate, and to proliferate in the presence of appropriate culture medium. The ability of adhered cells to proliferate may be determined visually by observing increased coverage of the solid substrate over a period of time by the adhered cells. Alternatively, proliferation of adhered cells may be determined by maintaining the initially adhered cells on the solid support over a period of time, removing and counting the adhered cells and observing an increase in the number of maintained adhered cells as compared to the number of initially adhered cells. In some embodiments, the cell line is capable of at least 10, more preferably at least 50, and most preferably at least 100, cell divisions prior to senescence.

[0064] The term “transgenic” when used in reference to a cell refers to a cell which contains a transgene and/or whose genome has been manipulated by man by molecular biological techniques. Transgenic cells may be produced by several methods including the introduction of a “transgene” comprising nucleic acid (usually DNA) into a target cell or integration of the transgene into a chromosome of a target cell by way of human intervention, such as by the methods described herein.

[0065] The term “transgene” as used herein refers to any nucleic acid sequence which is introduced into the cell by experimental manipulations. A transgene may be an “endogenous DNA sequence” or a “heterologous DNA sequence” (i.e., “foreign DNA”). The term “endogenous DNA sequence” refers to a nucleotide sequence which is naturally found in the cell into which it is introduced so long as it does not contain some modification (e.g., a point mutation, the presence of a selectable marker gene, etc.) relative to the naturally-occurring sequence. The term “heterologous DNA sequence” refers to a nucleotide sequence which is ligated to, or is manipulated to become ligated to, a nucleic acid sequence to which it is not ligated in nature, or to which it is ligated at a different location in nature. Heterologous DNA is not endogenous to the cell into which it is introduced, but has been obtained from another cell. Heterologous DNA also includes an endogenous DNA sequence which contains some modification. Generally, although not necessarily, heterologous DNA encodes RNA and proteins that are not normally produced by the cell into which it is expressed. Examples of heterologous DNA include reporter genes, transcriptional and translational regulatory sequences, selectable marker proteins (e.g., proteins which confer drug resistance), etc.

[0066] “Wild-type” when in reference to a cell, molecule, etc., refers to a cell, molecule, etc. whose structure is the same as found in nature without alteration by man (such as by chemical and/or molecular biological techniques, etc.).

[0067] “Polymorphism” when in reference to a genomic sequence refers to differences in the sequence of the genomic sequence between individuals, wherein the differences are too common to be due merely to new mutation. In preferred embodiments, the polymorphism has a frequency of at least 1% in the population.

[0068] “Optimize for gene expression based on codon bias of a virus” when in reference to a nucleotide sequence encoding a protein, means increasing the proportion the nucleotide sequence's codons that are preferentially and/or specifically used by the virus when compared to another virus and/or compared to a cell. “Optimize for gene expression based on codon bias of a cell” when in reference to a nucleotide sequence encoding a protein, means increasing the proportion the nucleotide sequence's codons that are preferentially and/or specifically used by the cell when compared to another cell and/or compared to a virus. Methods of optimizing gene expression based on codon bias of a virus and/or cell are known in the art (U.S. Pat. Nos. 6,096,304 and 8,129,119; US 2007/0042047).

[0069] “Reporter” and “marker” are used interchangeably to refer to a DNA, RNA, and/or polypeptide sequence that is detectable in any detection system, including, but not limited to enzyme (e.g., ELISA, as well as enzyme-based histochemical assays), fluorescent, and luminescent systems. Exemplary reporter genes include, for example, β-glucuronidase gene, green fluorescent protein (GFP) gene, E. coli β-galactosidase (LacZ) gene, Halobacterium β-galactosidase gene, Neuropsora tyrosinase gene, human placental alkaline phosphatase gene, and chloramphenicol acetyltransferase (CAT) gene, Aequorin (jellyfish bioluminescence) gene, Firefly luciferase (EC 1.13.12.7) from the American firefly, Photinus pyralis, Renilla luciferase (EC 1.13.12.5) from the sea pansy Renilla reniformis, and Bacterial luciferase (EC 1.14.14.3) from Photobacterium fischeri.

[0070] The terms “posttranscriptional gene silencing” and “PTGS” refer to silencing of gene expression in plants after transcription, and appears to involve the specific degradation of mRNAs synthesized from gene repeats. The term “cosuppression” refers to silencing of endogenous genes by heterologous genes that share sequence identity with endogenous genes.

[0071] “Mammalian cell” refers to a cell of a mammal.

[0072] “Mammal” includes human, non-human primate, murine (such as mouse and rat), ovine, bovine, ruminant, lagomorph, porcine, caprine, equine, canine, feline, and ave. In particular embodiments, a mammalian cell is exemplified by a cell from mouse, rat, guinea pig, hamster, ferret and chinchilla.

[0073] A subject “in need” of a particular intervention, such as in need of reducing one or more symptoms of a disease and/or of altering the level of expression of a protein and/or of altering the level of infection by a pathogen, includes a subject that exhibits and/or is at risk of exhibiting one or more symptoms for which intervention may be desired. For Example, subjects may be at risk based on family history, genetic factors, environmental factors, etc. This term includes animal models of the disease. Thus, administering a composition to a subject in need of reducing one or more symptoms of a disease and/or of altering the level of expression of a protein and/or of altering the level of infection by a pathogen, includes prophylactic administration of the composition (i.e., before symptoms are clinically and/or or sub-clinically detectable) and/or therapeutic administration of the composition (i.e., after symptoms are clinically and/or or sub-clinically detectable).

[0074] The term “specifically” altering the level of expression of a first protein (such as a virus protein, or a protein that is encoded by a first nucleotide sequence that is optimized for gene expression based on codon bias of a virus) is a relative term that means that the quantity of the first protein and/or the quantity of mRNA encoding the first protein is altered (i.e., increased or decreased by any statistically significant amount) without substantially altering the level of expression of a second reference protein (such as a mammalian cell protein, or a protein encoded by a second nucleotide sequence that is optimized for gene expression based on codon bias of a cell that is permissive to a virus)

[0075] “Biological sample” includes specimens obtained from a subject, including body fluids (such as urine, blood, plasma, fecal matter, cerebrospinal fluid (CSF), semen, sputum, and saliva), as well as solid tissue. Biological samples also include a cell (such as cell lines, cells isolated from tissue whether or not the isolated cells are cultured after isolation from tissue, fixed cells such as cells fixed for histological and/or immunohistochemical analysis), tissue (such as biopsy material), cell extract, tissue extract, and nucleic acid (e.g., DNA and RNA) isolated from a cell and/or tissue, and the like.

[0076] A “control sample” refers to a sample used for comparing to another sample by maintaining the same conditions in the control and other samples, except in one or more particular variable in order to infer a causal significance of this varied one or more variable on a phenomenon. For example, a “positive control sample” is a control sample in which the phenomenon is expected to occur. For example, a “negative control sample” is a control sample in which the phenomenon is not expected to occur.

[0077] The terms “reduce,” “inhibit,” “diminish,” “suppress,” “decrease,” and grammatical equivalents (including “lower,” “smaller,” etc.) when in reference to the level of any molecule (e.g., amino acid sequence, and nucleic acid sequence, antibody, etc.), cell, virus particle, and/or phenomenon (e.g., level of expression of a protein (such as Schlafen (Slfn) and/or virus protein), level of virus infection of a cell, risk to disease, disease symptom, binding to a molecule, specificity of binding of two molecules, affinity of binding of two molecules, specificity to disease, sensitivity to disease, affinity of binding, enzyme activity, etc.) in a first sample (or in a first subject) relative to a second sample (or relative to a second subject), mean that the quantity of molecule, cell and/or phenomenon in the first sample (or in the first subject) is lower than in the second sample (or in the second subject) by any amount that is statistically significant using any art-accepted statistical method of analysis. In one embodiment, the quantity of molecule, cell and/or phenomenon in the first sample (or in the first subject) is at least 10% lower than, at least 25% lower than, at least 50% lower than, at least 75% lower than, and/or at least 90% lower than the quantity of the same molecule, cell and/or phenomenon in the second sample (or in the second subject). In another embodiment, the quantity of molecule, cell, and/or phenomenon in the first sample (or in the first subject) is lower by any numerical percentage from 5% to 100%, such as, but not limited to, from 10% to 100%, from 20% to 100%, from 30% to 100%, from 40% to 100%, from 50% to 100%, from 60% to 100%, from 70% to 100%, from 80% to 100%, and from 90% to 100% lower than the quantity of the same molecule, cell and/or phenomenon in the second sample (or in the second subject). In one embodiment, the first subject is exemplified by, but not limited to, a subject that has been manipulated using the invention's compositions and/or methods. In a further embodiment, the second subject is exemplified by, but not limited to, a subject that has not been manipulated using the invention's compositions and/or methods. In an alternative embodiment, the second subject is exemplified by, but not limited to, a subject to that has been manipulated, using the invention's compositions and/or methods, at a different dosage and/or for a different duration and/or via a different route of administration compared to the first subject. In one embodiment, the first and second subjects may be the same individual, such as where the effect of different regimens (e.g., of dosages, duration, route of administration, etc.) of the invention's compositions and/or methods is sought to be determined in one individual. In another embodiment, the first and second subjects may be different individuals, such as when comparing the effect of the invention's compositions and/or methods on one individual participating in a clinical trial and another individual in a hospital.

[0078] The term “not substantially reduced” when in reference to the level of any molecule (e.g., amino acid sequence, and nucleic acid sequence, antibody, etc.), cell, virus particle, and/or phenomenon (e.g., level of expression of a protein (such as Schlafen (Slfn) and/or virus protein), level of virus infection of a cell, risk to disease, disease symptom, binding to a molecule, specificity of binding of two molecules, affinity of binding of two molecules, specificity to disease, sensitivity to disease, affinity of binding, enzyme activity, etc.) in a first sample (or in a first subject) relative to a second sample (or relative to a second subject), means that the quantity of molecule, cell and/or phenomenon in the first sample (or in the first subject) is from 91% to 100% of the quantity in the second sample (or in the second subject).

[0079] The terms “increase,” “elevate,” “raise,” and grammatical equivalents (including “higher,” “greater,” etc.) when in reference to the level of any molecule (e.g., amino acid sequence, and nucleic acid sequence, antibody, etc.), cell, virus particle, and/or phenomenon (e.g., level of expression of a protein (such as Schlafen (Slfn) and/or virus protein), level of virus infection of a cell, risk to disease, disease symptom, binding to a molecule, specificity of binding of two molecules, affinity of binding of two molecules, specificity to disease, sensitivity to disease, affinity of binding, enzyme activity, etc.) in a first sample (or in a first subject) relative to a second sample (or relative to a second subject), mean that the quantity of the molecule, cell and/or phenomenon in the first sample (or in the first subject) is higher than in the second sample (or in the second subject) by any amount that is statistically significant using any art-accepted statistical method of analysis. In one embodiment, the quantity of the molecule, cell and/or phenomenon in the first sample (or in the first subject) is at least 10% greater than, at least 25% greater than, at least 50% greater than, at least 75% greater than, and/or at least 90% greater than the quantity of the same molecule, cell and/or phenomenon in the second sample (or in the second subject). This includes, without limitation, a quantity of molecule, cell, and/or phenomenon in the first sample (or in the first subject) that is at least 10% greater than, at least 15% greater than, at least 20% greater than, at least 25% greater than, at least 30% greater than, at least 35% greater than, at least 40% greater than, at least 45% greater than, at least 50% greater than, at least 55% greater than, at least 60% greater than, at least 65% greater than, at least 70% greater than, at least 75% greater than, at least 80% greater than, at least 85% greater than, at least 90% greater than, and/or at least 95% greater than the quantity of the same molecule, cell and/or phenomenon in the second sample (or in the second subject). In one embodiment, the first subject is exemplified by, but not limited to, a subject that has been manipulated using the invention's compositions and/or methods. In a further embodiment, the second subject is exemplified by, but not limited to, a subject that has not been manipulated using the invention's compositions and/or methods. In an alternative embodiment, the second subject is exemplified by, but not limited to, a subject to that has been manipulated, using the invention's compositions and/or methods, at a different dosage and/or for a different duration and/or via a different route of administration compared to the first subject. In one embodiment, the first and second subjects may be the same individual, such as where the effect of different regimens (e.g., of dosages, duration, route of administration, etc.) of the invention's compositions and/or methods is sought to be determined in one individual. In another embodiment, the first and second subjects may be different individuals, such as when comparing the effect of the invention's compositions and/or methods on one individual participating in a clinical trial and another individual in a hospital.

[0080] The terms “alter” and “modify” when in reference to the level of any molecule (e.g., amino acid sequence, and nucleic acid sequence, antibody, etc.), cell, virus particle, and/or phenomenon (e.g., level of expression of a protein (such as Schlafen (Slfn) and/or virus protein), level of virus infection of a cell, risk to disease, disease symptom, binding to a molecule, specificity of binding of two molecules, affinity of binding of two molecules, specificity to disease, sensitivity to disease, affinity of binding, enzyme activity, etc.) refer to an increase or decrease.

[0081] “Without substantially altering,” “substantially unaltered” and grammatical equivalents when in reference to the level of any molecule (e.g., amino acid sequence, and nucleic acid sequence, antibody, etc.), cell, virus particle, and/or phenomenon (e.g., level of expression of a protein (such as Schlafen (Slfn) and/or virus protein), level of virus infection of a cell, risk to disease, disease symptom, binding to a molecule, specificity of binding of two molecules, affinity of binding of two molecules, specificity to disease, sensitivity to disease, affinity of binding, enzyme activity, etc.) means that the quantity of molecule, cell and/or phenomenon in the first sample (or in the first subject) is not increased or decreased by a statistically significant amount relative to the second sample (or in a second subject). Thus in one embodiment, the quantity of molecule, cell and/or phenomenon in the first sample (or in the first subject) is from 90% to 100% (including, for example, from 91% to 100%, from 92% to 100%, from 93% to 100%, from 94% to 100%, from 95% to 100%, from 96% to 100%, from 97% to 100%, from 98% to 100%, and/or from 99% to 100%) of the quantity in the second sample (or in the second subject).

[0082] Reference herein to any numerical range expressly includes each numerical value (including fractional numbers and whole numbers) encompassed by that range. To illustrate, and without limitation, reference herein to a range of “at least 50” includes whole numbers of 50, 51, 52, 53, 54, 55, 56, 57, 58, 59, 60, etc., and fractional numbers 50.1, 50.2 50.3, 50.4, 50.5, 50.6, 50.7, 50.8, 50.9, etc. In a further illustration, reference herein to a range of “less than 50” includes whole numbers 49, 48, 47, 46, 45, 44, 43, 42, 41, 40, etc., and fractional numbers 49.9, 49.8, 49.7, 49.6, 49.5, 49.4, 49.3, 49.2, 49.1, 49.0, etc. In yet another illustration, reference herein to a range of from “5 to 10” includes each whole number of 5, 6, 7, 8, 9, and 10, and each fractional number such as 5.1, 5.2, 5.3, 5.4, 5.5, 5.6, 5.7, 5.8, 5.9, etc.

### BRIEF DESCRIPTION OF THE INVENTION

[0083] The inventors have identified a family of interferon-induced proteins (schlafen=Slfn) that act as viral restriction factors. Specifically, the inventors demonstrate that Slfn11 expression inhibits the production of (but not infection by) retroviruses. Surprisingly, abrogation of Slfn11 expression substantially increases the release of retrovirus by producing cells.

[0084] Slfn proteins were first identified in 1998 by Steve Hedrick, however, their function remained elusive. The inventors found Slfn proteins induced by interferon regulatory factor 3 (IRF3) and interferons after pathogen recognition, and have been working towards identifying their cellular function since 2003. So far, no prior art reports indicate the antiviral properties of Slfn proteins.

[0085] The invention's Slfn11 protein inhibits the production of retrovirus from infected cells, rather than preventing the initial infection. The inventors hypothesized that other Slfn family members will exert a similar effect on other virus groups. The inventors have identified the point of action in the (selective) inhibition of viral protein synthesis and consequential reduction in the assembly of the viral particle.

[0086] The invention provides compounds or proteins that increase Slfn expression or activation would present a novel group of anti-(retro)viral drugs.

[0087] The invention provides methods for monitoring Slfn expression that are useful prognostic and/or diagnostic indicator of symptom development (e.g. AIDS) as a consequence of viral infection.

[0088] For example, data herein show that huSlfn11 potently and specifically abrogates the production of retroviruses such as HIV-1. The studies revealed that huSlfn11 has no effect on the early steps of the retroviral infection cycle including reverse transcription, integration and transcription. Rather, huSlfn11 acts at the late stage of virus production by selectively inhibiting the expression of viral proteins in a codon usage-dependent manner. We further find that huSlfn11 binds tRNA, and counteracts changes in the tRNA pool elicited by the presence of HIV. In summary, our studies identified a novel antiviral mechanism within the innate immune response in which huSlfn11 selectively inhibits viral protein synthesis in HIV-infected cells by means of codon-bias discrimination.

[0089] Furthermore, data herein show that analysis of the HIV replication cycle revealed that huSlfn11 does not inhibit reverse transcription, integration, or production and nuclear export of vRNA, nor did we observe a block in budding or release of viral particles. However, we discovered a selective inhibition in the synthesis of virally encoded proteins. Intriguingly, Coccia et al. had previously observed a specific inhibition of viral protein synthesis in HIV-infected cells in response to interferon, but did not identify the factors responsible for the effect (Coccia et al., J Biol Chem 269, 23087-23094 (1994)). While not intending to limit the invention to any particular mechanism, the inventors postulate that, in one embodiment, huSlfn11 acts at the point of virus protein synthesis by exploiting the distinct viral codon bias towards A/T nucleotides. This model supports the notion that the antiviral activity of huSlfn11 extends to other viruses with rare codon bias such as influenza, but not to AAV or HSV. While not intending to limit the invention to any particular mechanism, in one embodiment, huSlfn11 interacts with all tRNAs in-vitro. Direct binding of huSlfn11 to tRNA offers the possibility that huSlfn11 either sequesters tRNAs, prevents their maturation via post-transcriptional processing or accelerates their deacylation. In either case, if already rare tRNAs are further reduced, tRNA availability might manifest as the rate limiting step in the synthesis of proteins involving those tRNAs. In contrast, a lesser or no impact would be expected on proteins synthesized via plentiful tRNAs, as even if a fraction of those tRNAs is ‘eliminated’, translation initiation will likely remain the rate limiting event. In conclusion, our results establish huSlfn11 as a potent, interferon-inducible restriction factor against retroviruses such as HIV, mediating its antiviral effects on the basis of codon usage discrimination.

1. Methods for Screening Compounds that Alter Schlafen Expression

[0090] The invention provides a method for screening one or more candidate compounds for activity in altering (i.e., increasing or decreasing) the level of expression of Schlafen (Slfn) in a mammalian target cell, comprising a) contacting the one or more candidate compounds with a mammalian target cell that expresses Schlafen (Slfn) (e.g., expresses Slfn mRNA and/or protein) to produce a contacted cell, and b) measuring the level of expression of one or more Slfn (e.g., level of Slfn mRNA and/or protein) in the contacted cell. Thus, in one embodiment, an altered level of expression of one or more Slfn in the contacted cell compared to in the target cell identifies the one or more candidate compounds as having activity in altering (i.e., increasing or decreasing) the level of expression of Slfn in the target cell.

[0091] The invention's methods are useful in, for example, identifying compounds that alter the antiviral activity of Slfn in cells, and that may be used to increase and/or decrease the level of one or more virus proteins that are formed inside the cell and/or released from the cell, and/or used to increase and/or decrease the number of virus particles formed inside the cell, and/or used to increase and/or decrease the number of virus particles released from the cell.

[0092] In one embodiment, the method may further comprise measuring the level of expression of the one or more Slfn (e.g., level of Slfn mRNA and/or protein) in one or more of the target cell and the contacted cell.

[0093] In some embodiment, the invention contemplates that the step of measuring the level of expression of one or more Slfn comprises one or more of measuring the level of Slfn mRNA and measuring the level of Slfn protein.

[0094] The invention further provides a compound identified using any one or more of the methods and/or compositions described herein. In one embodiment, the compound is purified and/or isolated.

[0095] The invention also provides a compound identified the invention's methods. In one embodiment, the compound is purified and/or isolated.

2. Methods for Screening Compounds that Alter Virus Infection

[0096] The invention further provides a method for screening one or more one or more candidate compounds for activity in altering (i.e., increasing or decreasing) the level of virus infection of a mammalian host cell, comprising a) providing i) a virus, ii) a mammalian host cell that is susceptible to the virus, and iii) one or more candidate compounds, b) contacting the mammalian host cell with the virus and with the one or more candidate compounds to produce a contacted cell, and c) measuring the level of virus infection of the contacted cell (e.g., level of virus genomic DNA and/or RNA, level of transcription of virus genomic DNA into RNA, level of one or more virus proteins, number of virus particles formed inside the cell and/or number of virus particles released from the cell). In one embodiment, an altered level of infection of the contacted cell compared to a cell that is not contacted with the one or more candidate compounds identifies the one or more candidate compounds as having activity in altering (i.e., increasing or decreasing) the level of virus infection of the host cell.

[0097] In one embodiment, one or more candidate compounds are identified by one or more of the methods described herein.

[0098] The invention contemplates that the virus, mammalian host cell that is susceptible to the virus, and the one or more candidate compounds are contacted in any order. Thus, in one embodiment, the step of contacting comprises contacting the host cell with the virus prior to contacting with the one or more candidate compounds. This is useful in, for example, identifying prophylactic compounds that may be used before exposure to, and/or before infection with, a virus.)

[0099] In another embodiment, the step of contacting comprises contacting the host cell with the virus after contacting with the one or more candidate compounds. This is useful in, for example, identifying therapeutic compounds that alter one or more steps of viral infection after exposure to, and/or after infection with, a virus, including the level of viral fusion with the cell membrane to gain entry into the cell, level of virus genomic DNA and/or RNA, level of transcription of virus genomic DNA into RNA, level of one or more virus proteins, number of virus particles formed inside the cell, and/or number of virus particles released from the cell.

[0100] In a further embodiment, the step of contacting comprises contacting the host cell substantially simultaneously with the virus and with the one or more candidate compounds. This is useful in, for example, identifying prophylactic and therapeutic compounds that alter one or more steps of viral infection before exposure to, and/or before infection with, after exposure to, and/or after cell infection with a virus (e.g., level of virus genomic DNA and/or RNA, level of transcription of virus genomic DNA into RNA, level of one or more virus proteins, number of virus particles formed inside the cell, and/or number of virus particles released from the cell)

[0101] In some embodiments, it may be desirable to detecting a reduction in the level of the virus infection of the mammalian host cell. In some embodiments, the reduction is from 20% to 100% in the level of the virus infection of the mammalian host cell, including any percentage reduction there between, such as from 25% to 100%, from 30% to 100%, from 35% to 100%, from 40% to 100%, from 45% to 100%, from 50% to 100%, from 55% to 100%, from 60% to 100%, from 65% to 100%, from 70% to 100%, from 75% to 100%, from 80% to 100%, from 85% to 100%, from 90% to 100%, and from 95% to 100%.

[0102] For example, data herein demonstrate that huSlfn11 inhibited HIVVSV-G (FIG. 14a) production from 293T cells from a control titer of 1.0 to a titer of 0.09 (i.e., 91% inhibition), and also inhibited MSCV (FIG. 20b) production from 293T cells from a control titer of 1.0 to a titer of 0.08 (i.e., 92% inhibition).

[0103] Also, data herein also demonstrate that the AAA-domain-containing, NH2-terminal region (huSlfn11-N; amino acid 1-579) inhibited HIVVSV-G (FIG. 14a) production from 293T cells from a control titer of 1.0 to a titer of 0.39 (i.e., 61% inhibition), and also inhibited MSCV (FIG. 20b) production from 293T cells from a control titer of 1.0 to a titer of 0.05 (i.e., 95% inhibition).

[0104] In some embodiment, the step of measuring the level of virus infection of the contacted cell comprises measuring one or more of the a) level of one or more genomic nucleic acid sequences of the virus, b) level of virus RNA that is transcribed from one or more genomic DNA sequence of the virus, c) level of one or more virus proteins, d) number of virus particles formed inside the contacted cell, and e) number of virus particles released from the contacted cell.

[0105] For example, where the virus comprises a retrovirus, such as Human Immunodeficiency Virus (HIV), the step of measuring the level of virus infection may include measuring the level of viral RNA encoding, and/or measuring the level of one or more HIV proteins, exemplified by, but not limited to p55 group specific antigen (Gag), p24 capsid protein, Reverse Transcriptase (RT) protein, Viral Infectivity Factor (Vif) protein, Viral Protein U (Vpu) protein, and Viral Protein R (Vpr) protein. Data herein demonstrate that huSlfn11 inhibited expression of HIV p55 Gag protein, p24 capsid protein (FIGS. 15a, 15b, and 22), RT protein, Vif protein, Vpu protein and Vpr protein (FIGS. 15a and b).

[0106] In some embodiments, the methods may further comprise measuring the level of expression of one or more Slfn (e.g., level of Slfn mRNA and/or protein) in one or more of the host cell and the contacted cell.

[0107] The invention also provides a compound identified the invention's methods. In one embodiment, the compound is purified and/or isolated.

3. Methods for Screening Compounds that Differentially Alter Viral Protein Synthesis Compared to Cellular Protein Synthesis

[0108] The invention also provides a method for screening one or more candidate compounds for altering (i.e., increasing or decreasing) the level of expression of one or more virus proteins, comprising a) providing i) a first cell that expresses a first heterologous nucleotide sequence encoding a heterologous polypeptide, wherein the first heterologous nucleotide sequence is optimized for gene expression based on codon bias of the virus, ii) a second cell that expresses a second heterologous nucleotide sequence encoding the heterologous polypeptide, wherein the second heterologous nucleotide sequence is optimized for gene expression based on codon bias of a cell that is permissive to the virus, and iii) one or more candidate compounds, b) contacting the one or more candidate compounds with the first cell to produce a first contacted cell, c) contacting the one or more candidate compounds with the second cell to produce a second contacted cell, and d) measuring the level of expression (e.g., level of mRNA and/or protein) of the heterologous polypeptide in the first contacted cell and in the second contacted cell. In one embodiment, an altered level of expression of the heterologous polypeptide in the first contacted cell and a substantially unaltered level of expression of the heterologous polypeptide in the second contacted cell identifies the one or more candidate compounds as specifically altering (i.e., increasing or decreasing) the level of expression of one or more proteins of the virus.

[0109] The invention's method is useful for identifying compounds that alter the level of infection of a cell by a virus (e.g., translation of virus genomic sequences into virus proteins, assembly of virus proteins into virus particles, and/or release of virus particles from the cell) without substantially altering the level of cellular protein expression by cells harboring the virus.

[0110] In one embodiment, the one or more candidate compounds comprise a test polypeptide sequence that is encoded by a nucleic acid sequence comprised in the first cell and in the second cell, and the contacting step comprises expressing the test polypeptide sequence by the first cell and by the second cell. Thus, in a particular embodiment, the test polypeptide sequence comprises Schlafen (Slfn). Data herein demonstrate the effect of the exemplary heterologous test polypeptide sequence huSlfn11 on expression of Gag protein (Example 11, FIG. 15d) and on expression of GFP (Example 14, FIGS. 16d and e) that are encoded by DNA sequences that are optimized for gene expression based on codon bias of a virus or of a mammalian cell.

[0111] In a further embodiment, the heterologous polypeptide comprises a marker protein (such as green fluorescent protein (GFP)). Data herein (Example 14, FIGS. 16d and e) demonstrate that the exemplary protein huSlfn11 inhibited the expression of GFP (which harbors similar codon-bias as HIV), whereas expression of EGFP (which has been optimized for gene expression based on codon bias of mammalian cells), was largely refractory to inhibition by huSlfn11.

[0112] In another embodiment, the heterologous polypeptide comprises a virus protein. Data herein (Example 11, FIG. 15d) demonstrate that the exemplary protein huSlfn11 strongly altered expression of Gag protein that was optimized for gene expression based on codon bias of HIV (Gag^{vir}), but did not substantially alter expression of Gag protein that was optimized for gene expression based on codon bias of human cells (Gag^{opt}).

[0113] In a further embodiment, the heterologous polypeptide comprises a marker protein. Data herein (Example 14, FIGS. 16d and e) demonstrate that the exemplary protein huSlfn11 inhibited the expression of GFP (which harbors similar codon-bias as HIV), whereas expression of EGFP (which has been optimized for gene expression based on codon bias of mammalian cells), was largely refractory to inhibition by huSlfn11.

### 4. Methods for Determining Risk of Viral Infection

[0114] a. Schlafen (Slfn) Polymorphism

[0115] The invention provides methods for determining whether one or more Schlafen (Slfn) polymorphisms are associated with increased risk for disease (e.g., infection with virus). Thus, in one embodiment, the invention provides a method for identifying one or more Schlafen (Slfn) polymorphisms as altering the level of risk of a subject to infection by a virus, comprising a) providing i) a first sample (e.g. cells, tissues, cell extracts, tissue extracts, etc.) comprising genomic Schlafen (Slfn) sequence from a first population of subjects infected by the virus, and ii) a second (e.g., control) sample comprising genomic Schlafen (Slfn) sequence from a second population of subjects not infected by the virus, b) determining the presence of one or more of i) wild type Schlafen (Slfn) gene sequence in the first sample and in the second sample, and ii) one or more Schlafen (Slfn) polymorphisms in the first sample and in the second sample, c) measuring the ratio of the one or more Schlafen (Slfn) polymorphisms relative to the wild type Schlafen (Slfn) gene sequence in one or more of i) the first sample, and ii) the second sample.

[0116] Generic methods for determining the association of genetic polymorphisms with susceptibility to disease are known in the art (Lee et. al., “Genetic polymorphisms and susceptibility to lung disease, J Negat Results Biomed. 2006; 5: 5.; Lin et al. “HLA-E gene polymorphism associated with susceptibility to Kawasaki disease and formation of coronary artery aneurysms,” Arthritis & Rheumatism Volume 60, Issue 2, pages 604-610, February 2009.

[0117] In some embodiments, the method further comprises detecting a difference in the ratio in the first sample relative to the ratio in the second sample. In one embodiment, a difference identifies the one or more Schlafen (Slfn) polymorphisms as altering the level of risk of the mammalian subject to infection by the virus.

[0118] The invention further provides methods for determining the risk of disease (e.g., infection by a virus) based on the presence of one or more Schlafen (Slfn) polymorphisms. Thus, in one embodiment, the invention provides a method for determining the risk of a mammalian subject to infection by a virus, comprising detecting, in a biological sample that comprises genomic Schlafen (Slfn) sequence from the subject, one or more Schlafen (Slfn) polymorphisms. In one embodiment, one or more Schlafen (Slfn) polymorphisms are identified by any of the methods described herein. In a further embodiment, the detecting step optionally comprises detecting an increased ratio of the one or more Schlafen (Slfn) polymorphisms in the subject, such as compared to a control subject lacking infection by the virus.

[0119] b. Schlafen (Slfn) Expression

[0120] The invention provides methods for determining whether an altered level of expression of Schlafen (Slfn) is associated with increased risk for disease (e.g., infection with virus). Thus, in one embodiment, the invention provides a method for identifying Schlafen (Slfn) as altering the level of risk of a subject to infection by a virus, comprising measuring the level of expression of Schlafen (Slfn) in i) a first sample (e.g. cells, tissues, cell extracts, tissue extracts, etc.) from a first population of subjects infected by the virus, and ii) a second (e.g., control) sample from a second population of subjects not infected by the virus. In one embodiment, the method further comprises detecting an altered level of expression in the first sample relative to the second sample. In a particular embodiment, detecting an altered level identifies Schlafen (Slfn) as altering the level of risk of the subject to infection by the virus.

[0121] The invention further provides methods for determining the risk of disease (e.g., infection by a virus) based on an altered level of Schlafen (Slfn) expression. Thus, in one embodiment, the invention provides a method for determining the risk of a mammalian subject to infection by a virus, comprising detecting an altered level of expression of Schlafen (Slfn) in a biological sample from the subject (e.g., compared to a control subject lacking infection by the virus).

### 5. Methods for Altering the Levels of Virus Infection

[0122] The invention provides methods for reducing and/or increasing virus protein synthesis, and/or reducing and/or increasing the level of virus particles formed inside a cell, and/or reducing and/or increasing the level of virus particles released from a cell.

[0123] Thus, in one embodiment, the invention provides a method for altering the level of expression of virus protein (and/or the number of virus particles formed inside an infected cell and/or the number of virus particles released from an infected cell) by a target mammalian cell that is susceptible to a virus, comprising administering to the cell one or more compounds in an amount that alters (i.e., increases or decreases) the level of expression of one or more Schlafen (Slfn) in the cell. The invention's methods are useful in, for example, prophylactic and/or therapeutic applications, to prevent and/or reduce viral infection. This is also useful in applications where it is desirable to increase the production of viral proteins and/or viral particles, such as for use in the production of vaccines, in gene therapy for delivery of drugs and/or genes, etc.)

[0124] In one embodiment, the method further comprises measuring the level of expression of the one or more Schlafen (Slfn) in the cell. In one preferred embodiment, measuring the level of expression of the one or more Slfn comprises measuring one or more of the a) level of genomic nucleic acid sequences encoding the one or more Slfn, b) level of mRNA encoding the one or more Slfn, and c) level of the one or more Slfn protein.

[0125] In a particular embodiment, one or more of the compounds that alter (i.e., increase or decrease) the level of expression of the Slfn in the target mammalian cell is identified by any one or more of the methods described herein.

[0126] Thus, in some embodiments, the target cell is infected with the virus. This is useful in, for example, prophylactic and/or therapeutic applications, to prevent and/or reduce viral infection. This is also useful in applications where it is desirable to increase the production of viral proteins and/or viral particles, such as for use in the production of vaccines, in gene therapy for delivery of drugs and/or genes, etc.

[0127] In another embodiment, the target cell is not infected with the virus. This is useful in, for example, therapeutic applications, to reduce viral infection after it occurs. This is also useful in applications where it is desirable to increase the production of viral proteins and/or viral particles, such as for use in the production of vaccines, in gene therapy for delivery of drugs and/or genes, etc.

[0128] In one embodiment, the target cell is permissive to the virus, and/or is a transgenic cell that expresses one or more heterologous Slfn, and/or is a wild-type cell that expresses endogenous Slfn, and/or is a human cell, and/or is a non-human cell, and/or is a cell capable of generating a multicellular animal (e.g., fertilized egg cell, eight-cell embryo, blastocoele cell, midgestation embryo cell, and embryonic stem (ES) cell)

[0129] In particular embodiments, it may be desirable to reduce virus protein synthesis, and/or reduce the level of virus particles formed inside a cell, and/or reduce the level of virus particles released from a cell. This may be useful in, for example, prophylaxis and treatment of viral infection. Thus, in some embodiments, the cell is in vitro. In other embodiments, the cell is in vivo in a mammalian subject. In a further embodiment, the subject is in need of one or more of a) reducing the level of expression of one or more proteins of the virus, b) reducing the number of virus particles inside the subject's cells, and c) reducing the number of virus particles released from the subject's cells. In some embodiment, the method further comprises measuring the level of expression of the one or more virus proteins. In a particular embodiment, the step of measuring comprises measuring one or more of the a) level of one or more genomic nucleic acid sequences of the virus, b) level of virus RNA that is transcribed from one or more genomic DNA sequence of the virus, c) level of one or more virus proteins, d) number of virus particles formed inside cells of the subject, and e) number of virus particles released from cells of the subject.

[0130] In particularly preferred embodiments, the virus is a retrovirus that comprises Human Immunodeficiency Virus (HIV). Data herein demonstrate inhibition of HIV particle formation and/or release (FIG. 14a). In a further preferred embodiment, the HIV protein is exemplified by one or more of p55 group specific antigen (Gag), p24 capsid protein, Reverse Transcriptase (RT) protein, Viral Infectivity Factor (Vif) protein, Viral Protein U (Vpu) protein, and Viral Protein R (Vpr) protein. Data herein demonstrate that huSlfn11 inhibited expression of HIV p55 Gag protein, p24 capsid protein (FIGS. 15a, 15b, and 22), RT protein, Vif protein, Vpu protein and Vpr protein (FIGS. 15a and b).

[0131] In particular embodiments, it may be desirable to increase virus protein synthesis, and/or increase the level of virus particles formed inside a cell, and/or increase the level of virus particles released from a cell. This may be useful in, for example, vaccine applications and/or gene therapy applications.

### 6. Transgenic Animals

[0132] The invention also provides a transgenic non-human mammal comprising a homozygous deletion of at least a portion of one or more Schlafen (Slfn) gene, wherein the deletion is comprised in one or more of CD4+ T cell, macrophage cell, and dendritic cell of the mammal.

[0133] Methods for producing knockout animals are known in the art (U.S. Pat. No. 7,247,767). Knockout animals may be produced using transgenic cells that comprise a deletion of Schlafen (Slfn) gene, and that are capable of generating an animal, such as fertilized egg cell, eight-cell embryo, blastocoele cell, midgestation embryo cell, and embryonic stem (ES) cell. For example, fertilized egg cells may be implanted into the uterus of a pseudopregnant female and allowed to develop into an animal. These cells have successfully been used to produce transgenic mice, sheep, pigs, rabbits and cattle (Hammer et al., (1986) J. Animal Sci.:63:269; Hammer et al., (1985) Nature 315:680-683). Other cells include pre-implantation embryo cells. For example, blastomere cells (Jaenisch, (1976) Proc. Natl. Acad. Sci USA 73:1260-1264; (Jahner et al., (1985) Proc. Natl. Acad. Sci. USA 82:6927-6931; Van der Putten et al., (1985) Proc. Natl. Acad Sci USA 82:6148-6152), and eight-cell embryo cells from which the zona pellucida has been removed (Van der Putten (1985), supra; Stewart et al., (1987) EMBO J. 6:383-388). The pre-implantation embryos which are manipulated in accordance with the invention's methods may be transferred to foster mothers for continued development. Alternatively, cells may be at a later stage of embryonic development, such as blastocoele cells and midgestation embryo cells (Jahner et al., (1982) Nature 298:623-628). Yet another cell type is an embryonic stem (ES) cell. ES cells are pluripotent cells which may be directly derived from, for example, the inner cell mass of blastocysts (Doetchman et al., (1988) Dev. Biol. 127:224-227), from inner cell masses (Tokunaga et al., (1989) Jpn. J. Anim. Reprod. 35:173-178), from disaggregated morulae (Eistetter, (1989) Dev. Gro. Differ. 31:275-282) or from primordial germ cells (Matsui et al., (1992) Cell 70:841-847). Transgenic mice may be generated from ES cells which have been treated in accordance with the invention's methods by injection of several ES cells into the blastocoel cavity of intact blastocysts (Bradley et al., (1984) Nature 309:225-256). Alternatively, a clump of ES cells may be sandwiched between two eight-cell embryos (Bradley et al., (1987) in “Teratocarcinomas and Embryonic Stem Cells: A Practical Approach,” Ed. Robertson E. J. (IRL, Oxford, U.K.), pp. 113-151; Nagy et al., (1990) Development 110:815-821). Both methods result in germ line transmission at high frequency.)

[0134] In a particular embodiment, the transgenic non-human mammal is susceptible to infection by human immunodeficiency virus (HIV). In another embodiment, the transgenic non-human mammal exhibits one or more symptoms of Acquired Immune Deficiency Syndrome (AIDS), such as one or more of a CD4+ T cell count below 200 cells per microliter, pneumocystis pneumonia, cachexia, esophageal candidiasis, respiratory tract infections, opportunistic infections by bacteria, viruses, fungi and parasites, Kaposi's sarcoma, Burkitt's lymphoma, primary central nervous system lymphoma, cervical cancer, prolonged fevers, sweats (particularly at night), swollen lymph nodes, chills, weakness, weight loss and diarrhea. These animals are useful as an animal model for Acquired Immune Deficiency Syndrome (AIDS) that is caused by the human immunodeficiency virus (HIV). This animal model may be used in, for example, testing the efficacy of one or more candidate compounds in reducing HIV infection of one or more cells of the transgenic mammal and/or reducing one or more symptoms of AIDS in the transgenic mammal (described below).

7. Methods for Using Transgenic Animals for Screening Compounds that Alter Virus Infection

[0135] The invention contemplates using the transgenic animals for screening compounds that alter virus infection. Thus, in one embodiment, the invention provides a method for screening one or more candidate compounds for activity in altering (i.e., increasing or decreasing) the level of infection of a mammalian host cell by human immunodeficiency virus (HIV), comprising a) providing i) human immunodeficiency virus (HIV), ii) any one or more of the transgenic non-human mammals described herein (e.g., mammal comprising a homozygous deletion of Schlafen (Slfn) gene), and iii) one or more candidate compounds, b) contacting the transgenic non-human mammal with the HIV and with the one or more candidate compounds under conditions for infection of cells of the mammal with the HIV, and c) measuring the level of infection of the cells with the HIV (e.g., level of HIV genomic RNA, level of one or more HIV proteins, number of HIV particles formed inside the cell, and/or number of HIV particles released from the cell). In one embodiment, an altered level of infection of the cells compared to cells that are not contacted with the one or more candidate compounds identifies the one or more candidate compounds as having activity in altering (i.e., increasing or decreasing) the level of the HIV infection of the cells.

[0136] The invention contemplates that the virus, transgenic non-human mammal, and the one or more candidate compounds are contacted in any order. Thus, in one embodiment, the step of contacting comprises contacting the transgenic non-human mammal with the HIV prior to contacting with the one or more candidate compounds. This is useful in, for example, identifying prophylactic compounds that may be used before exposure to, and/or before infection with, HIV.)

[0137] In another embodiment, the step of contacting comprises contacting the transgenic non-human mammal with the HIV after contacting with the one or more candidate compounds. This is useful in, for example, identifying therapeutic compounds that alter one or more steps of HIV infection after exposure to, and/or after infection with, HIV, including the level of HIV fusion with the cell membrane to gain entry into the cell, level of HIV genomic RNA, level of transcription of HIV genomic RNA into protein, level of one or more HIV proteins, number of HIV particles formed inside the cell, and/or number of HIV particles released from the cell.

[0138] In a further embodiment, the step of contacting comprises contacting the transgenic non-human mammal substantially simultaneously with the HIV and with the one or more candidate compounds. This is useful in, for example, identifying prophylactic and therapeutic compounds that alter one or more steps of HIV infection before exposure to, and/or before infection with, after exposure to, and/or after cell infection with HIV (e.g., level of HIV genomic RNA, level of transcription of HIV genomic RNA into protein, level of one or more HIV proteins, number of HIV particles formed inside the cell, and/or number of HIV particles released from the cell.

[0139] In one embodiment, it may be desirable to measure the effect of the one or more candidate compounds on one or more symptoms of Immune Deficiency Syndrome (AIDS).

[0140] The invention further provides a compound identified by using any of the transgenic animals described herein. In one embodiment, the compound is purified and/or isolated.

### 8. Transgenic Cells

[0141] The invention provides a transgenic non-human mammalian cell comprising a deletion of Schlafen (Slfn) gene. These cells are useful in measuring the effect of test agents on HIV infection in these cells, and/or for producing the transgenic knockout animals of the invention, and/or for producing virus proteins for generating vaccines, and as packaging cells for the generation of virus particles in gene therapy applications.

[0142] In one embodiment, the transgenic non-human mammalian cell is derived from any one or more of the transgenic non-human mammals described herein.

[0143] In a particular embodiment, the transgenic non-human mammalian cell is susceptible to a virus. These cells are useful in, for example, producing virus proteins for generating vaccines. Additional uses include use as packaging cells for the generation of virus particles that contain therapeutic genes for gene therapy applications (e.g., cancer therapy).

[0144] In a particular embodiment, the deletion of Schlafen (Slfn) gene is a heterozygous deletion or a homozygous deletion.

[0145] In a further embodiment, the transgenic non-human mammalian cell comprises an immortalized cell.

[0146] In a particular embodiment, the transgenic non-human mammalian cell comprises one or more of CD4+ T cells, macrophage cells, and dendritic cells. These cells are useful in, for example, measuring the effect of test agents on HIV infection in these cells.

[0147] In a further embodiment, the transgenic non-human mammalian cell comprises one or more of fertilized egg cell, eight-cell embryo, blastocoele cell, midgestation embryo cell, and embryonic stem (ES) cell. These cells are useful in, for example, producing the transgenic knockout animals of the invention.

9. Methods for Using Transgenic Cell Lines for Screening Compounds that Alter Virus Infection

[0148] The invention contemplates using the transgenic cell lines for screening compounds that alter virus infection. Thus, in one embodiment, the invention provides a method for screening one or more one or more candidate compounds for activity in altering (i.e., increasing or decreasing) the level of infection of a mammalian cell by a virus (such as HIV), comprising a) providing i) virus (e.g., HIV), ii) any one or more of the transgenic mammalian cells described herein (e.g., transgenic cell comprising a deletion of Schlafen (Slfn) gene), and iii) one or more candidate compounds, b) contacting the transgenic mammalian cell with the virus and with the one or more candidate compounds under conditions for infection of the transgenic mammalian cell with the virus, and c) measuring the level of infection of the cells with the virus (e.g., level of virus genomic DNA and/or RNA, level of one or more virus proteins, number of virus particles formed inside the cell, and/or number of virus particles released from the cell). In one embodiment, an altered level of infection of the cells compared to cells that are not contacted with the one or more candidate compounds identifies the one or more candidate compounds as having activity in altering (i.e., increasing or decreasing) the level of the virus infection of the cells.

[0149] The invention contemplates that the virus, transgenic mammalian cell, and the one or more candidate compounds are contacted in any order. Thus, in one embodiment, the step of contacting comprises contacting the transgenic mammalian cell with the virus prior to contacting with the one or more candidate compounds. This is useful in, for example, identifying prophylactic compounds that may be used before exposure to, and/or before infection with, virus.)

[0150] In another embodiment, the step of contacting comprises contacting the transgenic mammalian cell with the virus after contacting with the one or more candidate compounds. This is useful in, for example, identifying therapeutic compounds that alter one or more steps of virus infection after exposure to, and/or after infection with, virus, including the level of virus fusion with the cell membrane to gain entry into the cell, level of virus genomic RNA and/or DNA, level of transcription of virus genomic sequences into protein, level of one or more virus proteins, number of virus particles formed inside the cell, and/or number of virus particles released from the cell.

[0151] In a further embodiment, the step of contacting comprises contacting the transgenic mammalian cell substantially simultaneously with the virus and with the one or more candidate compounds. This is useful in, for example, identifying prophylactic and therapeutic compounds that alter one or more steps of virus infection before exposure to, and/or before infection with, after exposure to, and/or after cell infection with virus (e.g., level of virus genomic sequences, level of transcription of virus genomic sequences into protein, level of one or more virus proteins, number of virus particles formed inside the cell, and/or number of virus particles released from the cell.

[0152] The invention further provides a compound identified by using any of the transgenic cells described herein. In one embodiment, the compound is purified and/or isolated.

### 10. Schlafen (Slfn)

[0153] The invention's compositions and/or methods may comprise using Schlafen (Slfn). “Schlafen” and “Slfn” interchangeably refer to one or more proteins that are encoded by the Schlafen (Slfn) genes, which are a subset of Interferon Stimulated early response Genes (ISGs), and which are also directly induced by pathogens via the Interferon Regulatory Factor 3 (IRF3) pathway (Sohn, W. J. et al. Novel transcriptional regulation of the schlafen-2 gene in macrophages in response to TLR-triggered stimulation. Mol Immunol 44, 3273-3282 (2007)). Slfn genes encode a family of Slfn proteins limited to mammalian organisms, and are exemplified by the proteins (such as, but not limited to, Slfn1, Slfn2, Slfn3, Slfn4, Slfn5, Slfn8, Slfn9, Slfn10, Slfn11, Slfn12, Slfn12L, Slfn13, and Slfn14) in Table 1 and FIG. 25.

TABLE 1
Exemplary mammalian Schlafen (Slfn) for use in any one or more of the
invention's compositions and/or methods

| Organism | Slfn | GenBank Protein Accession No. |
|---|---|---|
| Homo sapiens | 5 | AAI25202.1; AAH21238.1; NP_659412.3; Q08AF3.1; AAI25201.1; |
| | | CAD80167.1; ABM87182.1; ABM83860.1 |
| | 11 | Q7Z7L1.2; NP_001098060.1; NP_001098058.1; NP_689483.3; |
| | | NP_001098059.1; NP_001098057.1; AAH52586.1; AAI41661.1; |
| | | CAL38551.1 |
| | 12 | NP_060512.3; AAH35605.1; Q8IYM2.2; NP_060512.3; |
| | | AAH35605.1 |
| | 12L | Q6IEE8.3; NP_001182719.1 |
| | 13 | NP_653283.3; AAI36623.1; AAI71771.1; Q68D06.1; CAL37815.1 |
| | 14 | P0C7P3.2; NP_001123292.1; AAI57878.1; AAI57880.1; |
| | | AAI40848.1; |
| Bos taurus | 3 | DAA19092.1; DAA19091.1 |
| | 11 | XP_002695699.1; XP_600064.2; |
| | 14 | NP_001192831.1 |
| Equus caballus | 5 | XP_001501499.3 |
| | 11 | XP_001501460.2 |
| | 14 | XP_001503985.2 |
| Sus scrofa | 11 | XP_003358204.1 |
| | 14 | XP_003358199.2 |
| Canis lupus | 5 | XP_003435343.1 |
| | 14 | XP_548260.3 |
| Mus musculus | 1 | NP_035537.1; EDL15691.1; AAH52869.1; AAC83825.1; |
| | | CAI25056.1 |
| | 2 | EDL15690.1; AAI38751.1; AAI38750.1; AAC83826.1; CAI25506.1; |
| | 3 | NP_035539.1; AAI45135.1; AAI38071.1; AAI32628.1; |
| | | AAC83827.1; CAI25417.1 |
| | 4 | AAH46511.1; NP_035540.2; AAI50771.1; AAH44865.1; |
| | | AAC83832.1; AAC83833.1; AAC83831.1; CAI25057.1 |
| | 5 | NP_899024.3; EDL15686.1; EDL15687.1; Q8CBA2.2; AAI17910.1; |
| | | AAI17911.1; AAP30074.1; AAP30075.1; |
| | 8 | AAH24709.1; NP_853523.2; NP_001161215.1; AAP30069.1; |
| | | AAP30068.1; CAI25502.1; CAI25503.1; CAI25501.1; |
| | 9 | NP_766384.2; AAP30071.1; AAP30070.1; AAI48385.1 |
| | 10 | AAI15829.1; NP_853520.3; AAP30073.1; AAP30072.1; AAI41536.1 |
| | 12L | NP_035538.1 |
| | 14 | NP_001159500.1 |
| Rattus | 1 | NP_035537.1 |
| norvegicus | | |
| | 3 | NP_446139.1; EDM05466.1; EDM05467.1 |
| | 5 | XP_001081036.1; XP_220775.3 |
| | 8 | EDM05463.1; AAH85777.1; |
| | 12 | XP_002724574.1; XP_001068751.2 |
| | 12L | NP_001100501.1; XP_577117.4; XP_001081053.3 |
| | 13 | NP_001013992.1; |
| | 14 | XP_002727830.2; XP_002724575.2; |
| Cricetulus | 5 | XP_003495874.1 |
| griseus | | |
| Pan | 5 | XP_523607.2 |
| troglodytes | | |
| | 11 | XP_001174320.1; XP_001174307.1; XP_001174334.1; |
| | | XP_001174314.1; XP_001174293.1 |
| | 12 | XP_001174271.1; XP_001174240.1; XP_523608.2 |
| | 12L | XP_001156165.2 |
| | 13 | XP_001174230.2 |
| | 14 | XP_511414.1 |
| Pan paniscus | 5 | XP_003818037.1 |
| | 11 | XP_003818036.1 |
| | 12 | XP_003818034.1; XP_003818035.1; |
| | 12L | XP_003818032.1 |
| | 13 | XP_003818033.1 |
| | 14 | XP_003818077.1 |
| Macaca | 5 | AFH31302.1; AFH31300.1; AFH31298.1; AFH31296.1; |
| mullata | | AFH31301.1; AFH31299.1; AFH31297.1; AFE76936.1; |
| | 11 | XP_001114006.2; |
| | 13 | AFH31205.1; AFE76823.1; AFE76824.1; XP_001114211.1 |
| | 14 | XP_001112128.1 |
| Pongo abelii | 5 | XP_002827306.2 |
| | 11 | XP_002827307.1 |
| | 12 | XP_003778840.1; XP_002827309.1 |
| | 12L | NP_001129013.1; Q5RCZ8.1 |
| | 13 | XP_003778842.1; XP_003778841.1 |
| | 14 | XP_002827334.1; |
| Nomascus | 5 | XP_003281405.1 |
| leucogenys | | |
| | 11 | XP_003281409.1; XP_003281407.1; XP_003281410.1; |
| | | XP_003281408.1; XP_003281406.1; |
| | 14 | XP_003281411.1 |
| Callithrix | 11 | XP_003733033.1 |
| jacchus | | |
| Otolemur | 5 | XP_003797275.1 |
| garnetti | | |
| | 12 | XP_003797278.1 |
| | 14 | XP_003795682.1 |
| Ailuropoda | 5 | XP_002923665.1 |
| melanoleuca | | |
| | 14 | XP_002923654.1 |
| Sarcophilus | 13 | XP_003770041.1 |
| harrisii | | |
| | 14 | XP_003770040.1 |
| Monodelphis | 14 | XP_001373598.2 |
| domestica | | |
| Mustela | 14 | AES06983.1 |
| putorius furo | | |

[0154] Nine murine and six human Slfn genes share a conserved NH2-terminus containing a putative AAA-domain, and long Slfns possess motifs resembling DNA/RNA helicase domains, a trait they share with the nucleic acid sensors RIG-I and MDA-5 (Yoneyama et al., J Immunol 175, 2851-2858, doi:175/5/2851 (pii) (2005)). Beyond that, Slfn proteins harbor no sequence similarity to other proteins. In vivo, short and long murine Slfns (muSlfns) inhibit T-cell development (Schwarz, et al., Immunity 9, 657-668, doi:S1074-7613(00)80663-9 (pii) (1998); Gesericket et al., Int Immunol 16, 1535-1548 (2004); Berger et al., Nat Immunol 11, 335-343, doi:ni.1847 (pii) 10.1038/ni.1847 (2010)), and levels of muSlfns are elevated after infection with Brucella or Listeria (Gesericket et al., 2004). However, many ISGs are of unknown or incompletely understood function.

[0155] In one embodiment, the invention contemplates a Schlafen protein sequence (and/or portion thereof) that has “at least 85% amino acid sequence identity” to any one or more of the Slfn proteins of Table 1 and FIG. 25, including, for example, at least 85% identity, at least 86% identity, at least 87% identity, at least 88% identity, at least 89% identity, at least 90% identity, at least 91% identity, at least 92% identity, at least 93% identity, at least 94% identity, at least 95% identity, at least 96% identity, at least 97% identity, at least 98% identity, and at least and 99% to any one or more of the Slfn proteins of Table 1 and FIG. 25.

[0156] In one embodiment, the invention contemplates “portion of Schlafen” sequence. The term “portion” of an amino acid sequence (as in a “portion of Schlafen” sequence) refers to fragments of that amino acid sequence. The fragments may range in size from an exemplary 50 contiguous amino acid residues to the entire amino acid sequence minus one amino acid residue. Thus, a polypeptide sequence comprising “at least a portion” of an amino acid sequence” comprises from 50 contiguous amino acid residues of the amino acid sequence to the entire amino acid sequence. In a preferred embodiment, the portion of Schlafen sequence is from amino acid 1 to 579 of any one or more of the Slfn proteins of Table 1 and FIG. 25. In another embodiment, the portion of Slfn sequence is at least 50-amino acids long and is comprised by the sequence from amino acid 1 to 579 of any one or more of the Slfn proteins of Table 1 and FIG. 25.

[0157] In one preferred embodiment, the invention contemplates Slfn that comprise Slfn11. In one embodiment, the Slfn11 comprises human Slfn11. Data herein demonstrate that the exemplary huSlfn11 reduced the formation of viral particles inside the cells (FIG. 21b). Data herein further demonstrate that the anti-retroviral effects of huSlfn11 were not limited to the exemplary retroviruses and cells used herein (Example 15, FIGS. 17c and 24).

[0158] In another embodiment, the Slfn11 comprises mouse Slfn11.

### 11. Target Cell

[0159] The invention's compositions and/or methods may comprise using a cell. A “cell” that may be used in any one or more of the invention's compositions and/or methods includes, without limitation, permissive cells, transgenic cells, wild type cells, mammalian cells, human cells, non-human cells, primary cells, cell line cells, and cells that are capable of generating an animal.

[0160] Thus, the invention's compositions and/or methods may comprise using a cell that is permissive to a virus. These cells are useful in, for example, optionally measuring the effect of the one or more candidate compounds on virus infection of the cell.

[0161] The invention's compositions and/or methods may comprise using a cell that is transgenic. In some embodiments, the transgenic cell comprises Slfn that is heterologous to the cell. In some embodiments, the transgenic cell is a 293T cell and the heterologous Slfn is exemplified by one or more of huSlfn5, huSlfn11 (amino acid 1 to amino acid 901), huSlfn11-N (amino acid 1 to amino acid 579) and huSlfn11-C (amino acid 523 to amino acid 901)). The transgenic cells are exemplified by 293T cells described herein that were transfected with huSlfn5, huSlfn11 (amino acid 1-901), huSlfn11-N (amino acid 1-579) or huSlfn11-C (amino acid 523-901) (FIG. 14g).

[0162] The invention's compositions and/or methods may comprise using a cell that is wild-type, such as a cell that expresses endogenous Slfn.

[0163] The invention's compositions and/or methods may comprise using a human cell, as exemplified, but not limited to, U937 cells (macrophage), ATCC# crl 1593.2; A-375 cells (melanoma/melanocyte), ATCC# crl-1619; KLE cells (uterine endometrium), ATCC# crl-1622; T98G cells (glioblastoma), ATCC# crl-1690; CCF-STTG1 cells (astrocytoma), ATCC# crl-1718; HUV-EC-C cells (vascular endothelium), ATCC# CRL-1730; UM-UC-3 cells (bladder), ATCC# crl-1749; CCD841-CoN cells (colon, ATCC# crl-1790; SNU-423 cells (hepatocellular carcinoma), ATCC# crl-2238; WI38 cells (lung, normal), ATCC# crl-75; Raji cells (lymphoblastoid), ATCC# ccl-86; BeWo cells (placenta, choriocarcinoma), ATCC# eel-98; HT1080 cells (fibrosarcoma), ATCC# ccl-121; MIA PaCa2 cells (pancreas), ATCC# crl-1420; CCD-25SK cells (skin fibroblast), ATCC# crl-1474; ZR75-30 cells (mammary gland), ATCC# crl-1504; HOS cells (bone osteosarcoma), ATCC# crl-1543; 293-SF cells (kidney), ATCC# crl-1573; LL47 (MaDo) cells (normal lymphoblast), ATCC# ccl-135; and HeLa cells (cervical carcinoma), ATCC# ccl-2.

[0164] The invention's compositions and/or methods may comprise using a non-human cell, as exemplified by, but not limited to, LM cells (mouse fibroblast), ATCC# ccl-1.2; NCTC 3526 cells (rhesus monkey kidney), ATCC# ccl-7.2; BHK-21 cells (golden hamster kidney), ATCC# ccl-10; MDBK cells (bovine kidney), ATCC# ccl-22; PK 15 cells (pig kidney), ATCC# ccl-33; MDCK cells (dog kidney), ATCC# ccl-34; PtK1 cells (kangaroo rat kidney), ATCC# ccl-35; Rk 13 cells (rabbit kidney), ATCC# ccl-37; Dede cells (Chinese hamster lung fibroblast), ATCC# ccl-39; Bu (IMR31) cells (bison lung fibroblast), ATCC# ccl-40; FHM cells (minnow epithelial), ATCC# ccl-42; LC-540 cells (rat Leydig cell tumor), ATCC# ccl-43; TH-1 cells (turtle heart epithelial), ATCC# ccl-50; E. Derm (NBL-6) cells (horse fibroblast), ATCC# ccl-57; MvLn cells (mink epithelial), ATCC# ccl-64; Ch1 Es cells (goat fibroblast), ATCC# ccl-73; Pl I Nt cells (raccoon fibroblast), ATCC# ccl-74; Sp I k cells (dolphin epithelial), ATCC# ccl-78; CRFK cells (cat epithelial), ATCC# ccl-94; Gekko Lung 1 cells (lizard-gekko epithelial), ATCC# ccl-111; Aedes Aegypti cells (mosquito epithelial), ATCC# ccl-125; ICR 134 cells (frog epithelial), ATCC# ccl-128; Duck embryo cells (duck fibroblast), ATCC# ccl-141; and DBS Fcl-1 cells (monkey lung fibroblast), ATCC# ccl-161.

### 12. Virus

[0165] The invention's compositions and/or methods may comprise using a virus. The term “virus” refers to obligate, ultramicroscopic, intracellular parasites incapable of autonomous replication (i.e., replication requires the use of the host cell's machinery). The term virus includes retroviruses and DNA viruses.

[0166] The invention's compositions and/or methods may comprise using a retrovirus. “Retrovirus” is a small enveloped RNA virus, containing two identical single stranded positive sense RNA genomes enclosed in an enveloped capsid. Retroviruses have an enzyme, called reverse transcriptase that gives them the unique property of transcribing their RNA into DNA after entering a cell. The retroviral DNA can then integrate into the chromosomal DNA of the host cell, to be expressed there. Retroviruses have a genome flanked by Long Terminal Repeats (LTR) and 4 main genes gag, pol, pro and env. Retroviruses are exemplified by lentivirus (such as “Human Immunodeficiency Virus” (“HIV”), Simian Immunodeficiency Virus, Feline Immunodeficiency Virus), baculovirus, “murine stem cell virus” (“MSCV”), simian foamy virus, avian leukosis virus, Rous sarcoma virus, mouse mammary tumor virus, murine leukemia virus, feline leukemia virus, bovine leukemia virus, human T-lymphotropic virus, walleye dermal sarcoma virus.

[0167] In a preferred embodiment, the retrovirus comprises HIV. Data herein demonstrate inhibition of HIV particle formation and/or release (FIG. 14a).

[0168] In another preferred embodiment, the retrovirus comprises murine stem cell virus (MSCV). Data herein demonstrate inhibition of MSCV particle formation and/or release (FIG. 20b).

[0169] The invention's compositions and/or methods may comprise using a DNA virus. “DNA virus” is a virus in which the genetic material is DNA rather than RNA, and are exemplified by Arenaviridae, Baculoviridae, Birnaviridae, Bunyaviridae, Cardiovirus, Corticoviridae, Cystoviridae, Epstein-Barr virus, Filoviridae, Hepadnviridae, Hepatitis virus, Herpesviridae, Influenza virus, Inoviridae, Iridoviridae, Metapneumovirus, Orthomyxoviridae, Papovavirus, Paramyxoviridae, Parvoviridae, Polydnaviridae, Poxyviridae, Reoviridae, Rhabdoviridae, Semliki Forest virus, Tetraviridae, Toroviridae, Vaccinia virus, Vesicular stomatitis virus. The DNA may be double-stranded or single-stranded. Double-stranded DNA viruses (class I viruses) include adenoviruses, “adeno-associated virus” (“AAV”), herpes viruses, and poxviruses. Single-stranded DNA viruses (class II viruses) include parvoviruses and coliphages.

### 13. Candidate Compound

[0170] The invention's compositions and/or methods may comprise using a candidate compound. The terms “candidate compound,” “test compound,” “compound,” “agent,” “test agent,” “molecule,” and “test molecule,” as used herein, interchangeably refer to any type of molecule (for example, a peptide, polypeptide, vaccine, antibody, nucleic acid, nucleic acid sequence, carbohydrate, saccharide, polysaccharide, lipid, organic molecule, inorganic molecule, etc.) obtained from any source (for example, plant, animal, and environmental source, etc.), or prepared by any method (for example, purification of naturally occurring molecules, chemical synthesis, genetic engineering, etc.).

[0171] A candidate compound may have a known, or unknown, structure and/or composition. Examples of candidate compounds that have unknown compositions include cell extracts, tissue extracts, growth medium in which prokaryotic, eukaryotic, and archaebacterial cells have been cultured, fermentation broths, protein expression libraries, DNA libraries, and the like.

[0172] The “candidate compound,” can be synthetic, naturally occurring, or a combination thereof. A synthetic candidate compound can be a member of a library of candidate compounds (e.g., a combinatorial chemical library). Methods for making these libraries of compounds are known in the art, such as methods for preparing oligonucleotide libraries (Gold et al., U.S. Pat. No. 5,270,163, incorporated by reference); peptide libraries (Koivunen et al. J. Cell Biol., 124: 373-380 (1994)); peptidomimetic libraries (Blondelle et al., Trends Anal. Chem. 14:83-92 (1995)) oligosaccharide libraries (York et al., Carb. Res. 285:99-128 (1996); Liang et al., Science 274:1520-1522 (1996); and Ding et al., Adv. Expt. Med. Biol. 376:261-269 (1995)); lipoprotein libraries (de Kruif et al., FEBS Lett., 399:232-236 (1996)); glycoprotein or glycolipid libraries (Karaoglu et al., J. Cell Biol. 130:567-577 (1995)); or chemical libraries containing, for example, drugs or other pharmaceutical agents (Gordon et al., J. Med. Chem. 37:1385-1401 (1994); Ecker and Crook, Bio/Technology 13:351-360 (1995), U.S. Pat. No. 5,760,029, incorporated by reference). Additional examples of methods for the synthesis of molecular libraries can be found in the art, for example in: DeWitt et al., Proc. Natl. Acad. Sci. U.S.A. 90:6909 (1993); Erb et al., Proc. Nad. Acad. Sci. USA 91:11422 (1994); Zuckermann et al., J. Med. Chem. 37:2678 (1994); Cho et al., Science 261:1303 (1993); Carrell et al., Angew. Chem. Int. Ed. Engl. 33.2059 (1994); Carell et al., Angew. Chem. Int. Ed. Engl. 33:2061 (1994); and Gallop et al., J. Med. Chem. 37:1233 (1994).

[0173] A synthetic candidate compound may be a member of a biological library or peptoid library (i.e., library of molecules having the functionalities of peptides, but with a novel, non-peptide backbone, which are resistant to enzymatic degradation but which nevertheless remain bioactive; see, e.g., Zuckennann et al., J. Med. Chem. 37: 2678-85 (1994)). The biological library and peptoid library are particularly suited for use with peptide libraries.

[0174] In addition, a synthetic candidate compound may be a member of a spatially addressable parallel solid phase library or solution phase library, of a synthetic library that uses methods such as a deconvolution method, a ‘one-bead one-compound’ library method, affinity chromatography selection. These methods are particularly suited to peptide libraries, non-peptide oligomer libraries, and small molecule libraries of compounds (Lam (1997) Anticancer Drug Des. 12:145).

[0175] Libraries of diverse molecules also can be obtained from commercial sources, e.g., Brandon Associates (Merrimakc, N.H.) and Aldrich Chemical Co (Milwaukee, Wis.).

[0176] A naturally occurring candidate compound can be a component of a cellular extract or bodily fluid (e.g., urine, blood, tears, sweat, or saliva). A naturally occurring candidate compound may be obtained by extraction and/or purification of commercially available libraries of bacterial, fungal, plant, and animal extracts.

[0177] A candidate compound includes both known therapeutic compounds, and potentially therapeutic compounds. An agent can be determined to be therapeutic by screening using the screening methods of the present invention. A “known therapeutic compound” refers to a therapeutic compound that has been shown (e.g., through animal trials or prior experience with administration to humans) to be effective in such treatment or prevention.

[0178] A candidate compound includes one or more amino acid sequence, exemplified by, but not limited to a) Slfn sequence (exemplified in Table 1 and FIG. 25), b) portion of Slfn sequence (e.g., amino acid 1 to 579 of any one or more of the Schlafen sequences of Table 1 and FIG. 25), c) amino acid sequence having at least 85% amino acid sequence identity to the Slfn sequence (exemplified in Table 1 and FIG. 25), and d) amino acid sequence having at least 85% amino acid sequence identity to the portion of a Slfn sequence.

[0179] Candidate compounds include an “RNA interference sequence” (also referred to as “RNAi sequence”) which refers to an small hairpin RNA (shRNA) sequence, RNAi sequence and/or small interfering RNA (siRNA) sequence that specifically binds to a target mRNA sequence (such as to Slfn mRNA sequence). RNA interference is the process of sequence-specific, post-transcriptional gene silencing in animals and plants, initiated by shRNA and/or siRNA that is homologous in its duplex region to the sequence of the silenced gene. The gene may be endogenous or exogenous to the organism, present integrated into a chromosome or present in a transfection vector that is not integrated into the genome. The expression of the gene is either completely or partially inhibited. RNAi may also be considered to inhibit the function of a target RNA; the function of the target RNA may be complete or partial. In both plants and animals, RNAi is mediated by RNA-induced silencing complex (RISC), a sequence-specific, multicomponent nuclease that destroys messenger RNAs homologous to the silencing trigger. RISC is known to contain short RNAs (approximately 22 nucleotides) derived from the double-stranded RNA trigger, although the protein components of this activity are unknown. However, the 22-nucleotide RNA sequences are homologous to the target gene that is being suppressed. Thus, the 22-nucleotide sequences appear to serve as guide sequences to instruct a multicomponent nuclease, RISC, to destroy the specific mRNAs. Carthew (2001) has reported (Curr. Opin. Cell Biol. 13 (2):244-248) that eukaryotes silence gene expression in the presence of dsRNA homologous to the silenced gene. Biochemical reactions that recapitulate this phenomenon generate RNA fragments of 21 to 23 nucleotides from the double-stranded RNA. These stably associate with an RNA endonuclease, and probably serve as a discriminator to select mRNAs. Once selected, mRNAs are cleaved at sites 21 to 23 nucleotides apart.

[0180] Thus, in one embodiment, one or more candidate compounds comprise an RNA interference (RNAi) sequence that specifically binds to an mRNA sequence that encodes one or more amino acid sequences exemplified by one or more of a) Slfn sequence (exemplified in Table 1 and FIG. 25), b) portion of Slfn sequence (e.g., amino acid 1 to 579 of any one or more of the Schlafen sequences of Table 1 and FIG. 25), c) amino acid sequence having at least 85% amino acid sequence identity to the Slfn sequence (exemplified in Table 1 and FIG. 25), and d) amino acid sequence having at least 85% amino acid sequence identity to the portion of Slfn sequence. In particular embodiments, the RNA interference sequence is exemplified by one or more of short hairpin RNA (shRNA) sequence, short interfering RNA (siRNA) sequence, and hairpin RNA (hpRNA) sequence.

[0181] Candidate compounds include shRNA. As used herein, the term “shRNA” or “short hairpin RNA” refers to a sequence of ribonucleotides comprising a single-stranded RNA polymer that makes a tight hairpin turn on itself to provide a “double-stranded” or duplexed region. shRNA can be used to silence gene expression via RNA interference. shRNA hairpin is cleaved into short interfering RNAs (siRNA) by the cellular machinery and then bound to the RNA-induced silencing complex (RISC). It is believed that the complex inhibits RNA as a consequence of the complexed siRNA hybridizing to and cleaving RNAs that match the siRNA that is bound thereto. Methods for designing an shRNA sequence are known in the art including web-based software BLOCK-iT™ RNAi Designer. The BLOCK-iT™ RNAi Designer software may be used to design siRNA, Stealth RNAi™ siRNA, miR RNAi inserts and shRNA inserts for any target sequence. In one embodiment, C43 targeting sequences were further prioritized based on guidelines described by Ui-Tei et al. (Ui-Tei et al. Nucleic Acids Res., 32, 936-948). These criteria were: i. A/U at the 5′ end of the antisense strand; ii. G/C at the 5′ end of the sense strand; iii. AU-richness in the 5′ terminal one-third of the antisense strand; and iv. The absence of any GC stretch over 9 bp in length.

[0182] Candidate compounds include siRNA. The term “siRNA” refers to short interfering RNA. In some embodiments, siRNAs comprise a duplex, or double-stranded region, of about 18-25 nucleotides long; often siRNAs contain from about two to four unpaired nucleotides at the 3′ end of each strand. At least one strand of the duplex or double-stranded region of a siRNA is substantially homologous to or substantially complementary to a target RNA molecule. The strand complementary to a target RNA molecule is the “antisense strand” the strand homologous to the target RNA molecule is the “sense strand,” and is also complementary to the siRNA antisense strand. siRNAs may also contain additional sequences; non-limiting examples of such sequences include linking sequences, or loops, as well as stem and other folded structures. siRNAs appear to function as key intermediaries in triggering RNA interference in invertebrates and in vertebrates, and in triggering sequence-specific RNA degradation during posttranscriptional gene silencing in plants.

[0183] Candidate compounds include hpRNA. The terms “hpRNA” and “hairpin RNA” refer to self-complementary RNA that forms hairpin loops and functions to silence genes (e.g. Wesley et al. (2001) The Plant Journal 27 (6):581-590; herein incorporated by reference). The term “ihpRNA” refers to intron-spliced hpRNA that functions to silence genes.

[0184] Candidate compounds include target RNA molecules. The term “target RNA molecule” refers to an RNA molecule to which at least one strand of the short double-stranded region of a siRNA is homologous or complementary. Typically, when such homology or complementarity is about 100%, the siRNA is able to silence or inhibit expression of the target RNA molecule. Although it is believed that processed mRNA is a target of siRNA, the present invention is not limited to any particular hypothesis, and such hypotheses are not necessary to practice the present invention. Thus, it is contemplated that other RNA molecules may also be targets of siRNA. Such targets include unprocessed mRNA, ribosomal RNA, and viral RNA genomes.

### EXPERIMENTAL

### Example 1

### a) Significance

[0185] Innate immune recognition is mediated by a system of germline-encoded receptors that recognize conserved pathogen-associated molecular patterns (PAMPs) (2). These pattern recognition receptors, or PRRs, are coupled to signaling cascades that mediate the induction of immune-response genes, and represent the most ancient host defense system in mammals, insects and plants. In mammals, one of the most pronounced consequences of activation of these sensors by viruses is the induction of type I IFN, a cytokine with potent antiviral activity. The mechanism by which IFNs activate gene expression has been the target of intense research efforts for many years. Binding of the type I IFNs, IFNα/β, to their specific cell surface receptors IFNAR1 and IFNAR2 leads to the tyrosine phosphorylation and activation of several members of the Signal Transducer and Activator of Transcription (STAT) family of transcription factors (3). Among those, STAT1, STAT2 and IRF9 cooperatively form the DNA binding protein complex ISGF3 which is required for upregulation of interferon stimulated genes (ISGs) through an Interferon Stimulated Response Element (ISRE). Numerous ISGs represent components of the antiviral defense such as the 2′-5′ oligoadenylate synthetase (4) and the dsRNA activated protein kinase (PKR) (5), cell surface proteins such as ICAM (6) or the MHC class I and II molecules (7), however, many other ISRE containing genes are of unknown or not well understood function.

[0186] Perhaps not surprisingly, since many ISGs have antiviral activity, viruses—including retroviruses such as HIV—evolved to suppress IFN induction or function. The existence of these viral countermeasures, coupled with the fact that multiple type 1 IFN-induced factors can restrict virus replication, serve to underscore the importance of innate cellular defense mechanisms in limiting, amongst others, infection by HIV. Despite the recognized antiviral activity of type I IFN, only a few specific factors that mediate the inhibitory effect of IFN on retrovirus replication have been identified. These include: TRIM5α which blocks HIV-1 infection at the reverse transcription stage (12-15); TRIM22 which blocks HIV-1 budding (16); TRIM31 which restricts an early step of HIV-1 replication (17, 18); APOBEC3G and 3F which act during reverse transcription by both cytidine deaminase-dependent and -independent mechanisms, and are counteracted by the HIV-1 accessory protein Vif (19-23); Tetherin/BST-2 which blocks viral budding and release (24, 25); ISG15 which blocks the Gag-Tsg101 interaction important for HIV-1 budding (26); and ISG20, a 3′-5′ exoribonuclease which can limit HIV-1 infection (27). However, little is known about cellular restriction factors that inhibit virus production (which is also evidenced by the absence of antiviral drugs acting at this point in the viral replication cycle).

[0187] Among the ISGs of unknown function are the Slfn genes, which encode a family of proteins that includes at least 10 distinct members in the mouse and 6 in humans. Slfns can be categorized into three distinct groups based on the length of the C terminus: short forms (muSlfn1 and muSlfn2), intermediate forms (muSlfn3 and 4), and long forms (muSlfn5, 8, 9, and 10), however, humans lack homologs to the short muSlfn1 and muSlfn2 isoforms (see FIG. 1). All Slfn proteins share a conserved NH2-terminal region that contains a putative divergent ATPase (AAA) domain, whereas long form Slfns possess additional short motifs that resemble domains found in members of the DNA/RNA helicase superfamily. In vivo, ectopically expressed short and long muSlfns inhibit T-cell development (8, 9), whereas in vitro, only muSlfn1 caused arrest of fibroblast growth by inhibition of cyclin D1 (8-10). Additionally, the expression levels of muSlfns were elevated after infection with the intracellular pathogens Brucella (11) and Listeria (9).

[0188] Only few publications exist on Slfn proteins, and besides their somewhat controversial inhibitory effect on cell cycle progression, very little is known about the molecular mechanism behind their action, or their biological functions. We discovered that expression of huSlfn11 attenuates the production of retroviruses including HIV, whereas abrogation of Slfn11 expression resulted in a significant increase in the release of infectious retrovirus. Slfn11 expression had no effect on early steps of the infection cycle encompassing entry, reverse transcription, integration and transcription, furthermore, we did not observe an inhibition of late stage budding or release of the viral particles. In contrast, our studies revealed a clear inhibition of protein synthesis, which was strikingly restricted to proteins of viral origin. This high degree of selectivity can be traced to the unique codon bias displayed by HIV, which favors A/T-rich codons. This proposal aims to define the role and the mechanism of Slfn proteins, particularly Slfn11, as inhibitors of retrovirus/HIV production.

[0189] The studies proposed in this application will for the first time address this novel antiviral function of Slfn proteins on a cellular and molecular level. The results will not only shed light onto a novel area of the innate antiviral response against HIV and other retroviruses (and likely other viruses with similar codon bias, e.g. Influenza), but will also provide the necessary understanding of Slfn protein function required to exploit their prospective diagnostic and therapeutic value.

### (b) Innovation

[0190] The innate immune response is an ancient defense system made up of functionally distinct subsystems that have evolved to counter infection by microbial pathogens including retroviruses such as HIV, the causative agent of AIDS. The innate response is generally not antigen-specific, and is composed of the interferon (IFN) system, as well as cell-based anti-pathogen countermeasures that serve to restrict the replication of pathogens early in infection. In addition, a successful innate response promotes the secretion of cytokines and growth factors that shape the later pathogen-specific, or acquired immune response composed of B- and T-lymphocytes. The ability to mount a vigorous innate response and to transition to a highly-specific acquired response is thought to be essential for combating and controlling infection. Compelling evidence suggests that immunological events occurring during the first days and weeks after retroviral infection are critical determinants shaping the course of, for instance, HIV/AIDS disease, and the mechanisms that underlie the failure of innate immune responses to restrict HIV infection are currently under intense investigation (28). Understanding the early innate immune response and the pathways that promote or restrict the kinetics of different steps of HIV infection is essential for devising novel pharmacological strategies for therapeutic intervention during these infectious disease processes, or to prevent infection.

[0191] The classical model for HIV infection describes a strong anti-HIV T-cell response early in infection, which results in suppression of virus loads in plasma, however this response is unable to completely clear the infection. The immunological events that occur during the first days and weeks after HIV infection are critical determinants that account for the failure of the later adaptive response to completely clear infection. Particularly innate immune response sensors such as the Toll-like Receptors (TLRs) or RIG-I like receptors (RLRs) involved in HIV infection have been the target of intense study. In contrast, little is known about cellular restriction factors that target the late stages in the viral replication cycle including those governing viral protein synthesis. Our discovery of a Slfn family protein as an executioner of an anti-retroviral innate immune response is completely novel and unique, and our proposed studies are aimed at the characterization of this novel innate immune system component set into motion by IRF-3 activation or type I interferon production.

[0192] The main focus of this application is to define the functional domains of Slfn11, determine the requirements for its anti-retroviral activity (e.g. ATP binding, oligomerization, etc.), and elucidate the molecular mechanism by which Slfn11 accomplishes inhibition of (retro)viral protein synthesis. In addition to these studies, we are also interested in determining whether functional homologs to huSlfn11 are present in the mouse. Five muSlfns exist with approximately equal sequence similarity to huSlfn11 (muSlfn 5, 8, 9, 10 & 14) and it is possible that one of these proteins is capable of inhibiting retrovirus production including HIV. In this case, it would be reasonable to theorize that HIV has evolved countermeasures against huSlfn11, which might be ineffective against the muSlfn11 homolog. As such, an unopposed murine Slfn family member could contribute to the block of HIV replication in murine cells, and a better understanding of this process will bring the field one step closer to a mouse model of HIV infection.

### (c) Approach

[0193] The first member of the Slfn family, Slfn1, was discovered by a subtractive hybridization between CD4⁺CD8⁺ double-positive and CD4⁺ single-positive T cells (8). Slfns represent a rapidly expanding family of proteins, which now includes at least ten distinct members in the mouse, but no homologs can be found in yeast, C. elegans or Drosophila. Strikingly, the only non-mammalian ‘organisms’ that encode slfn-like proteins are all members of the Pox-viruses. Each Slfn mRNA is encoded by a distinct gene rather than derived from alternative splicing. Murine Slfns can be categorized into three distinct groups based on the length of the C terminus: short forms (Slfn1 and Slfn2), intermediate forms (Slfn3 and 4), and long forms (Slfn5, 8, 9, 10 and 14), however, humans lack the short Slfn-1 and Slfn-2 isoforms. All Slfn proteins share a conserved NH2-terminal region that contains a putative divergent ATPase (AAA+) domain, whereas long Slfns possess several weakly preserved motifs found in members of the DNA/RNA helicase superfamily.

[0194] In vivo, short and long m-slfns inhibit T-cell development (8, 9), whereas in vitro, only slfn1 caused arrest of fibroblast growth by inhibition of cyclin D1 (8-10). However, the antiproliferative effects of Slfn proteins have been recently questioned (29). Additionally, the expression level of Slfns is elevated after infection with the intracellular pathogens Brucella (11) and Listeria (9). Overall, only a few publications exist in PubMed on Slfn proteins, and besides their controversial inhibitory effect on cell cycle progression, nothing is known about the molecular mechanism behind their action, or their biological functions.

[0195] Our lab has been investigating antiviral gene expression mediated by IRF3 and/or IFN for many years. In order to identify IRF3-dependent regulated genes, we performed a few years ago micro-array expression profiling on TLR-stimulated WT and IRF3^{-/-} peritoneal macrophages. Among the differentially induced genes were several members of the Slfn protein family. Subsequent analysis by qPCR confirmed that Slfn proteins are indeed induced by TLR ligation as well as IFN stimulation.

[0196] Reconciling the expression pattern results with the facts that Slfns harbor a putative helicase domain similar to RIG-I, we reasoned that Slfn proteins play a role in the innate immune response. As the human genome encodes fewer Slfn proteins than the murine genome, we decided to continue our studies with human cells. The prevailing Slfn in most human cells we tested is huSlfn11. We further observed that huSlfn11 was prominently expressed in HEK293, but not in HEK293T cells. HEK293-related cell lines can be used as packaging cells for the production of retrovirus, and we found that HEK293T cells produce significantly higher viral titers than HEK293 cells (FIG. 3, bars 1 & 4).

[0197] To address whether these differences can be attributed to dissimilar huSlfn11 expression, we ectopically expressed huSlfn11 (aa 1-901) in HEK293T cells, and analyzed their ability to produce ecotropic retrovirus after transfection with the appropriate plasmids. Indeed, huSlfn11, but not huSlfn5, inhibited virus production in 293T cells (FIG. 2). Furthermore, this activity was contained in the NH2-terminal, AAA+ domain-containing region of the huSlfn11 protein (aa 1-579), whereas no effect of the isolated COOH-terminal region (aa 523-901) was observed.

[0198] Conversely, we established stable HEK293 cells harboring a huSlfn11-specific shRNA or a non-targeting shRNA as control, and tested their ability to produce ecotropic retrovirus. Abrogation of huSlfn11 expression resulted in a dramatic increase in virus production (FIG. 3, bars 2 and 3).

[0199] Most importantly, the role of huSlfn11 as viral restriction factor is not limited to this mouse-tropic retrovirus, but similarly affected the production of VSV-pseudotyped HIV. As shown in FIG. 4, abrogation of huSlfn11 expression dramatically increases the amount of infectious HIV particles released from the cells.

[0200] Thus, the abrogation of huSlfn11 expression resulted in a significant increase in the production of infectious retrovirus, whereas overexpression of huSlfn11 attenuated virus production. Further studies confirmed the results obtained from the viral titer analysis by revealing a reduction in extracellular p24 and viral RNA levels in the presence of huSlfn11. The inhibitory effect of huSlfn11 on viral particle concentration in the supernatants was preserved regardless of the presence of viral envelope protein. In contrast, we did not detect a significant difference in intracellular viral RNA levels (see FIG. 5). It should also be noted that we did not observe any induction of ISGs such as ISG15, ISG54 or BST-2 in our experiments.

[0201] Strikingly, when these cell lines where infected with VSVg-pseudotyped HIV (FIG. 6), or amphitropic MSCV, no differences between the cell lines in the levels of luciferase expression were observed, demonstrating that huSlfn11 inhibits the production of the virus rather than the early stages of infection including entry, RT, integration or transcription (FIG. 6).

[0202] This suggested that the function of the huSlfn11 protein as an innate immune response factor is independent of other interferon-induced genes and lies in the very late stages of the infection cycle, possibly in the processes of viral protein translation or assembly. To test whether Slfn11 affects assembly or release, budding or release of HIV particles, we acquired EM images of these events in HEK293T and HEK293T^{Slfn11} cells. These studies illustrated that, once initiated, the budding and release processes were intact in the presence of huSlfn11, but a significantly lower number of such events occurred in the HEK293T^{Slfn11} cells correlating with a >90% reduction in p24 levels in the cell supernatants.

[0203] Next, the two cell sets were analyzed for the expression of viral proteins encoded by the retroviral vector pNL4-3.Luc.R⁺E⁻. In striking contrast to the unaltered viral RNA levels, there was a profound effect of huSlfn11 on the amount of the cell-associated p55 Gag precursor protein, and the p24 capsid protein derived through proteolytic cleavage of p55 during the maturation of the virions (FIG. 7A, top). To create a clearer picture of the effect of huSlfn11 on p55 expression, we eliminated its proteolytic processing by introducing a stop-codon into the pro gene in pNL4-3.Luc.R⁺E⁻ to abolish expression of the viral protease. The results showed that p24 could no longer be detected, however, modulation of p55 expression by huSlfn11 was still present. As with gag-derived proteins, huSlfn11 had a striking effect on the intracellular protein levels of reverse transcriptase (RT), Vif, Vpu and Vpr (FIG. 7A). Surprisingly, we did not observe any reduction in the amount of EGFP protein derived from a co-transfected mammalian expression vector, or of GAPDH (FIG. 7, bottom panels), indicating that the limited viral protein production is not the results of a global shutdown of protein synthesis.

[0204] Even more surprising, though, was our observation that expression of luciferase, which is encoded in the pNL4-3.Luc.R⁺E⁻ viral vector in place of the nef gene, was impervious to the presence of huSlfn11 (FIG. 7B, top), thus starkly contrasting the huSlfn11-mediated diminishment of all other proteins encoded on this vector. We therefore decided to test the effect of huSlfn11 on the expression of Nef in the context of pNL4-3-DEnv-EGFP which has part of the env gene replaced by EGFP, but harbors nef in its original position. Strikingly, as all other viral proteins Nef expression was inhibited by huSlfn11 (FIG. 7B, bottom). In summary, these findings lead us to conclude that huSlfn11 selectively suppresses viral protein expression via transcript-intrinsic properties, rather than through external regulatory factors or positional elements. This notion was further corroborated by the fact that huSlfn11 had no effect on an EGFP-RRE reporter system designed to monitor RRE-mediated events such as nuclear export of unspliced RNA.

[0205] Viral genomes are known to display biased nucleotide compositions that are quite different from human genes (30-39). For instance, extremely high frequencies of A nucleotides are found in the RNA genomes of the lentivirus group of retroviruses and of influenza virus (33, 37, 40), (41). The sequences of wild-isolate strains of HIV-1 are characterized by low GC content and suboptimal codon usage when compared to the host cell bias which is particularly marked for the gag and pol genes (34, 42-45). The unusually high AU content imparts a rare codon bias favoring A/U in the third position, and their presence has been demonstrated to induce ribosome pausing and inefficient translation. As the inhibitory effect of huSlfn11 on viral protein expression was found intrinsic to the affected transcript, we contemplated that huSlfn11 exploits the viral codon preference to specifically attenuate viral protein synthesis. To this end, we generated mammalian expression vectors containing only the ORF of HIV-1 gag with either the original viral codon bias as present in HIV-1 (Gag^{vir}), or with synonymous codon usage optimized for expression in human cells (Gag^{opt}). As is clearly evident in FIG. 8, huSlfn11 strongly affected the expression of Gag^{vir}, but was without any significant consequence for the expression of Gag^{opt}.

[0206] To unequivocally demonstrate that truly codon bias, and not the loss of other functions found in the Gag sequence (e.g. Rev binding- or cryptic splice sites) accounted for the observed differences, we also employed two GFP constructs (pcDNA5.1) that contain either A/T-biased codons (GFP) or G/C-biased codons (EGFP), but with identical protein sequence. As seen in FIG. 9, significant modulation of expression by huSlfn11 only occurs in the case of GFP, whereas translation of EGFP was only slightly affected by huSlfn11 (A/T biased codons did not significantly alter mRNA levels, and the minor differences have been corrected for in FIG. 9B). Importantly, the difference between the two GFPs increased in the presence of proteins derived from pNL4-3.Luc.R⁺E⁻, consistent with the reported altered tRNA pool during HIV infection (46). From these finding, without limiting the invention to any particular mechanism, the inventors are of the view that huSlfn11 is exploiting the distinct viral codon bias to selectively attenuate the expression of virally encoded proteins (note: increased susceptibility to APOBEC3G or methylation of integrated viral DNA might account for the lack of adaption of the viruses to utilize G/C-rich codons).

[0207] In summary, our systematic analysis of the individual stages of the HIV replication cycle revealed that huSlfn11 does not inhibit reverse transcription, integration, or production and nuclear export of viral RNAs. Furthermore, we did not observe a block in the budding or release of viral particles. However, we discovered a selective inhibition in the synthesis of virally encoded proteins. Without limiting the invention to any particular mechanism, the inventors are of the view that huSlfn11 interferes at the point of virus protein synthesis by exploiting the unique viral codon bias towards A and T nucleotides in the third position. Surprisingly, the A/T bias is significantly less prominent in the early viral gene products such as Rev or Tat, which is consistent with our observations that the generation of viral RNA and its export in unspliced forms appears impervious to huSlfn11. This model is also consistent with our observation that the antiviral activity of huSlfn11 extends to other retroviruses (and possibly other viruses with rare codon bias such as influenza). Our results clearly establish huSlfn11 as a potent, interferon-inducible restriction factor against retroviruses such as HIV, and future studies will determine whether other members of the Slfn family possess antiviral activity against distinct groups of viruses. To our knowledge this is the first evidence for a restriction factor to mediate its antiviral effects on the basis of synonymous codon bias.

[0208] Our lab has extensive experience in the characterization of the molecular mechanisms that govern the biological responses to interferons and pathogens, and in the analysis of signaling pathways and nucleic acid binding proteins. We are working with two local virologists recognized for their work on HIV and other viruses, Dr. Young and Dr. Guatelli, to elucidate the anti-(retro)viral effects of Slfns. In addition, we will characterize the effects of huSlfn11 on the tRNA pool.

[0209] Our salient findings are:

[0210] 1) Both human and murine Slfn proteins are inducible by IFNα/β, or TLR ligands such as dsRNA or LPS

[0211] 2) Slfn proteins contain a closely conserved amino-terminal domain albeit of no sequence similarity to any other protein outside the family. Limited homology to a deviant AAA+ domain found in bacterial RNA/DNA helicases is contained in a 100 aa stretch within this NH2-terminal region

[0212] 3) In over a dozen human cell lines or primary cells tested, huSlfn11 was the prevailing family member

[0213] 4) HEK293 cells express several Slfn proteins, whereas HEK293T cells lack almost all Slfn expression

[0214] 5) When transfected with MSCV-IRES-GFP and pCL-Eco helper constructs, or with pNL43LucR+E−HIV and pCMV-VSVg Env plasmids, HEK293T cells produce substantially more virus then HEK293 cells

[0215] 6) Ectopic expression of huSlfn11 (but not huSlfn5) in HEK293T cells dramatically inhibits retrovirus production, whereas ablation of Slfn11 expression in HEK293 cells significantly boosts virus production

[0216] 7) The expression of huSlfn11 does not cause a ‘generic’ antiviral state, as replication and production of DNA viruses (AAV and HSV) is not affected by huSlfn11 expression. Furthermore, no modulation of ISG induction by IFNα/β or TLR ligands was observed as a consequence of huSlfn11 expression.

[0217] 8) huSlfn11 expression does not affect the early stages of retroviral replication when cells were infected with VSVg-pseudotyped HIV (as entry is bypassed with VSVg-pseudotyped HIV, these steps encompass reverse transcription, integration, and transcription from the integrated sequence). Consequently, no effect of huSlfn11 on intracellular vRNA levels, splicing or export was observed.

[0218] 9) In contrast, attenuated vRNA and p24 levels in the supernatants of huSlfn11-expressing corroborated our results obtained from the viral titer determination via infection assays. The inhibitory effect of huSlfn11 is independent of the presence of viral envelope protein (production of non-enveloped viral capsids is inhibited by huSlfn11)

[0219] 10) EM analysis was unable to identify a specific block at the budding or release stage of virus production

[0220] 11) huSlfn11 potently inhibits synthesis of viral, but not cellular proteins in both uninfected and more prominently in HIV-infected cells, based on differences in codon bias between virus and host cell

[0221] 12) huSlfn11 can bind directly to tRNA in EMSAs and alters the tRNA pool of the host cell (FIGS. 11 & 12)

[0222] 13) Viral replication studies using WT HIVLAI and the CD4+ T cell line CEM confirmed the anti-retroviral function of huSlfn11

### Example 2

### Aim 1. To Define the Functional Domains in Slfn11

[0223] 1.1 Investigate the Role of the AAA+ Domain in the Function of Slfn11—

[0224] The ATP-binding AAA+ domain is the only well conserved motif found within all Slfn proteins, and a comprehensive alignment of all Slfn AAA+ domains with AAA sequences from other proteins revealed a number of highly invariant residues (e.g. the “FANT” or “GG” sequences), suggesting they contribute to the function of these proteins. Notably, all Slfn11 proteins carry a proline instead of a serine residue in the first position of the shown aligned AAA+ motifs (see FIG. 10). In order to determine the role of the AAA+ motif in huSlfn11 function, we propose to mutate the invariable “GG” sequence in huSlfn11, as well as to replace the first-positioned proline with a serine residue. In addition, we will create mutations in the AAA+ domain that have been determined in other AAA+-containing proteins to affect function. We will then determine the ability of these mutants to inhibit retrovirus production, and in parallel analyze their ability to bind and/or hydrolyze ATP in-vitro. The latter will be performed by incubation of the purified huSlfn11 protein with either ³²P-ATP, or the non-hydrolyzable ATP-analog ³²P-AMP-PNP. We will also mutate the AAA+ motif in huSlfn5 to the sequence present in huSlfn11 to determine whether the inability of huSlfn5 to inhibit retrovirus production lies within its different AAA+ domain. We predict that some of these AAA+ mutants will be defective in either ATP-hydrolysis and/or ATP-binding. The determination of the biological activity of such mutants will allow us to determine whether ATP-hydrolysis is required huSlfn11 to attenuate retrovirus production (which would indicate an as of yet unidentified enzymatic function of huSLfn11), or whether ATP-binding ‘merely’ promotes a conformational change in the protein that allows it to oligomerize and to interact with nucleic acids as has been reported for other AAA+ proteins (summarized in (47); see Aim 1.2).

[0225] 1.2 Characterize Whether huSlfn11 Acts in Oligomeric Form—

[0226] Oligomeric assembly is a hallmark of many AAA+ proteins and is a prerequisite for their biological function (47). It is therefore important to determine whether huSlfn11 can form oligomeric structures, and whether such larger complexes form as a consequence of ongoing virus production. We will use two complementary approaches to determine the formation of multimeric complexes. First, we will co-transfect plasmids encoding huSlfn11 with several distinct epitope tags (e.g. HA-huSlfn11, FLAG-huSlfn11, etc). Immunoprecipitation with antibodies directed against one tag, followed by Western blot analysis for the presence of the other tags will allow us to determine the formation of oligomers. Additionally, we will subject lysates from huSlfn11 expressing cells to size exclusion chromatography followed by immunoblot analysis of the resulting fractions. The first approach provides a straightforward system for the identification of the domains involved in oligomerization, whereas the second approach allows for the determination of the extent of oligomerization (e.g. pentamer, hexamer, etc.). Both approaches will be pursued in the presence and absence of virus production to resolve whether the presence of viral RNA or particles presents a trigger for the assembly process. Considering that most AAA+ proteins function as oligomers, we hypothesize that the same is true for Slfn proteins. In this case we will continue by mapping the Slfn ‘oligomerization domain’ with the ultimate goal of generating assembly-deficient mutants to clarify the role of oligomerization in Slfn function. The proposed experiments involve standard techniques, so it is not likely that we will encounter any significant technical challenges in the analysis, and the results will undeniably explicate if huSlfn11 oligomerization occurs, and if yes, whether it is of vital consequence for huSlfn11 function. In conjunction with the other parts of Aim 1, this subaim will provide critical insights into structural elements and the molecular mechanism that governs huSlfn11's function as a retroviral restriction factor. Additional significance of the SNP analysis proposed in Aim 3.2c will emerge when these results are put into the context of the collective findings obtained in Aims 1.1-3.

[0227] 1.3 Define the Nucleic Acid Binding Domain(s) of huSlfn11—

[0228] Our preliminary evidence demonstrated that huSlfn11N can bind to nucleic acids such as tRNA (see FIG. 10). Strikingly, no discernible (nucleic acid binding) domains of any kind could be identified within this short Slfn region, with the exception of the putative AAA+ motif. The NH2-terminal region of all Slfns is highly conserved (see FIG. 1), and our functional analysis of huSlfn11 revealed that this NH2-terminal region of huSlfn11 is equipotent to full-length huSlfn11 in the inhibition of retrovirus production (see FIG. 3). FIG. 1 further illustrates that long Slfn isoforms (including huSlfn11) contain an additional candidate nucleic acid binding domain, the DEAQ/Walker motif. The collective of our preliminary studies has lead us to our working hypothesis that huSlfn11 interferes with viral protein synthesis, most likely through interaction with tRNA (see Aim 2). One conserved feature of tRNAs is the presence of three stem-loop structures found in all tRNAs. Using partial tRNA sequences we will define the Slfn-binding region and test whether a specific stem loop is recognized by huSlfn11 binding (note: results from aim 2 will influence which tRNA(s) will be used as probes in these assays). In order to define the RNA-binding domain of huSlfn11, we will generate NH2- and COOH-terminal as well as internal deletion and point mutants of huSlfn11 to map the regions required for nucleic acid binding. In addition, we will introduce mutations into huSlfn11 known to disrupt nucleic acid interaction within other DEAQ-containing proteins. These experiments will not only provide us with vital information on the requirements and the role of huSlfn11 nucleic acid binding in its biological function, but will also allow us to generate huSlfn11 mutants that would predictably act as dominant-negative factors over wild-type huSlfn11 in the inhibition of retrovirus production. We have several assays in place to determine the nucleic acid binding capabilities of the different huSlfn11 proteins in-vitro (e.g. as shown in FIG. 11), and all huSlfn11 mutants will be subject to functional analysis in-vitro and in-vivo. We are also currently generating reporter constructs to facilitate faster initial screening of Slfns and their mutants. Specifically, we are placing the firefly luciferase coding sequence utilizing virus-favored codons and the cDNA for Renilla luciferase with human codon bias into pcDNA 5.1, separated by an IRES sequence. As both proteins are derived from the same mRNA, any changes in their ratios will indicate preferential inhibition of protein synthesis (note: two complementary constructs placing either the firefly or the renilla luciferase before the IRES will preclude any potentially misleading results due to interference with the IRES function).

[0229] 1.4 Explore Whether the Subcellular Location of huSlfn11 Changes During Retroviral Infection—

[0230] Preliminary immunohistochemical analysis using transiently expressed epitope-tagged huSlfn11 showed diffuse cytoplasmic staining of the protein. To corroborate this observation, we will create GFP-huSlfn11 constructs and generate stable HEK293T cell lines to avoid potential obscuring of specific sub-cellular localization through overexpression of the fusion protein. As we do not know at this point whether GFP fusion will affect the function of huSlfn11, we will create both NH2- and COOH-terminal fusion proteins, and test them first for their ability to attenuate retrovirus production in HEK293T cells. We will then examine the intracellular distribution of huSlfn11 in ‘resting’ cells, as well as in cells that have either been infected with replication-deficient VSVg-HIV, or that have been transfected with the pNL43LucR⁺E⁻HIV plasmid to determine whether either early or late stage events, respectively, of the viral infection cycle alter the subcellular localization of huSlfn11. As huSlfn11 expression does not affect the early stages of viral infection including integration and transcription, we predict that VSVg-HIV infection in the absence of new particle formation will not trigger a redistribution of huSlfn11 (e.g. its affiliation with mitochondria similar to the RIG-I helicases). In contrast, we would not be surprised to find that huSlfn11 ‘accumulates’ in the ribosomes. These experiments are technically straightforward, and will provide a definitive answer to the posed question. If we find that huSlfn11 translocates within the cell, we will follow up by investigating the mechanism that controls that movement (e.g. mass-spectrometric analysis to identify possible post-translational modifications of huSlfn11). Without limiting the invention to any particular mechanism, the inventors are of the view that if no movement of huSlfn11 is observed even though inhibition of virus production occurs, then this shows that accumulation at specific subcellular compartment is not required for the anti-retroviral function of huSlfn11.

### Example 3

### Aim 2. To Characterize the Inhibitory Effect of Slfn11 on Viral Protein Synthesis

[0231] Our collective preliminary findings already allow us to eliminate a large number of steps in the retroviral reproduction cycle as targets of huSlfn11 action, and strongly support the notion that huSlfn11 inhibits retrovirus production by attenuating viral protein synthesis through interference with tRNA function. Initial experiments revealed a dramatic change in the tRNA pool during HIV infection in huSlfn11-deficient cells (FIG. 12, middle), but not in cells expressing huSlfn11 (bottom). Consistent with our findings shown in FIG. 9, the effect of huSlfn11 becomes significantly more prominent in the presence of viral proteins. Particularly striking is the strong alteration of the tRNA for the UAA codon (red arrow), which accounts for 42% of Leu in HIV-Gag, but only 7% of Leu in the human genome.

[0232] In order to characterize the mechanism by which huSlfn11 attenuates retroviral protein synthesis production, we propose to:

[0233] 2.1 Investigate Whether huSlfn11 Preferentially Targets Specific tRNAs—

[0234] EMSAs using total tRNA as probe revealed clear dose-dependent shifting (FIG. 11), and at the highest amounts of huSlfn11 all of the probe was shifted, indicating that at least in-vitro, huSlfn11 is able to binds all tRNAs (this notion is also supported by the above shown tRNA array, however, we can at this point not exclude the possibility that HIV- or huSlfn11-mediated changes in specific tRNAs trigger a change in the total tRNA pool). To determine whether huSlfn11 binds to certain tRNAs with higher affinity, we will perform EMSAs with an amount of huSlfn11 that results in partial shifting, excise both the shifted and unshifted bands, and employ the tRNA arrays to analyze the tRNA composition in each band. If huSlfn11 binds distinct tRNAs with higher affinity, we will see an ‘enrichment’ of those tRNAs in the shifted band. In this case, without limiting the invention to any particular mechanism, the inventors are of the view that tRNAs complementary to codons favored by the virus would be the ones displaying greater affinity to huSlfn11, and the array results would certainly reveal the identify of those ‘preferred’ tRNAs. If the tRNA distribution is the same in both bands, we have to conclude that huSlfn11 binds all tRNAs indiscriminately. In that case, the logical conclusion would be that the impact of huSlfn11 on less abundant tRNAs (corresponding to viral codon bias) would be significantly greater than on highly expressed tRNAs.

[0235] 2.2 Investigate how huSlfn11 Alters the Cellular Pool of tRNAs—

[0236] The striking modulation of the cellular tRNA pool by the presence of HIV proteins (FIGS. 12 and (41)) is consistent with the fact that HIV-Gag encoded protein(s) interact(s) with numerous tRNA-synthetases (Source: HIV-1 Human Protein Interaction Database, NCBI). We are particularly interested in MA, as this small protein interacts with the tRNA synthetases in genome-wide association studies (N. Krogan; personal communication). However, it remains undetermined whether tRNA itself participates in this interaction, and we will therefore begin by testing whether Gag/tRNA-synthetase interaction is sensitive to RNAse treatment. We will then determine which of the HIV-derived protein(s) account(s) for the virus-induced changes in tRNA expression seen in FIG. 12 (the experiment shown employed the pNL4-3.Luc.R⁺E⁻ vector, thus, most viral proteins were expressed). We have (codon-optimized) expression constructs for all viral proteins, including the individual Gag-derived proteins. Based on the published interaction studies, Gag, or MA specifically, are our prime candidates.

[0237] The experiment depicted in FIG. 12 reflects the total tRNA concentration (aminoacylated=charged and uncharged tRNAs), however, a modification of sample preparation for the array experiments will allow for the distinction between charged and uncharged tRNAs (1). One possibility how huSlfn11 might counteract the HIV-mediated changes in tRNAs is by preventing charging of tRNAs. Recognition of individual tRNAs by their respective tRNA synthetases is crucially dependent on the distinct structures of the tRNAs. A bioinformatic alignment of the AAA+ domain of huSlfn11 revealed that it is most closely related to AAA+ domains found in bacterial RNA/DNA helicases. It is therefore possible that huSlfn11 possesses helicase activity, and that such activity could be directed against tRNA stem-loop structures, thus preventing charging of the tRNAs. Alternatively, the Gag/tRNA-synthetase complex and huSlfn11 might bind competitively to the tRNA. Regardless, the lack of aminoacylation of tRNA has been linked to reduced tRNA half-life (48), thus, inhibition of tRNA charging could lead to a decline in total tRNA concentration. We will therefore test 1) whether expression of huSlfn11 affects tRNA charging in vivo in the presence and absence of viral infection, and 2) whether purified, recombinant huSlfn11 interferes in in-vitro tRNA charging assays (note: results from aim 2.1 will determine which tRNA/tRNA synthetase will best be used as substrate). Although less likely, we also consider the possibility that huSlfn11 interferes with the addition of the CCA-tail by the nucleotidyltransferase during tRNA maturation, since this, too, could account for the changes in tRNA levels.

[0238] The function of Slfn proteins had remained a mystery for over a decade, and we have made great progress in relatively short time not only in identifying huSlfn11 as a retroviral restriction factor, but also in substantially narrowing down its point of action in the viral life cycle. While clearly still several possibilities exist with regard to the exact molecular mechanism by which huSlfn11 selectively alters translation efficiency, we are confident that, through a systematic step-by-step process, we will be successful in characterizing the process by which huSlfn11 inhibits the production of viral proteins.

### Example 4

### Aim 3. To Determine the Specificity of Slfns for Inhibition on HIV Replication

[0239] 3.1 a) Test the Additional Human Slfn Proteins for their Ability to Alter HIV Replication—

[0240] Our results thus far have demonstrated a certain level of specificity of Slfn function, as huSlfn11 did not alter adenovirus replication, nor did huSlfn5 affect retrovirus production. We are currently cloning the remaining huSlfn family members, and will test their ability to attenuate retrovirus production using the same two retroviral packaging/production systems (MSCV-IRES-GFP & pCL-Eco; pNL43LucR⁺E⁻HIV & pCMV-VSV-g Env) we employed in our preliminary studies. We will use HEK293T cells for these studies as we were unable to detect any endogenous Slfn expression in these cells. We do not anticipate any technical problems with this subaim, as we have already performed these experiments with huSlfn11.

[0241] 3.1 b) Confirm the Effects of huSlfn11 on WT-HIV Replication in T Cells—

[0242] Our data illustrate that Slfn11 inhibition of virus production is not unique to HIV, but also extends to Moloney Murine Leukemia Virus-based MSCV, suggesting a broader anti-retroviral mechanism. We still need to further corroborate our findings on HIV production with WT rather than VSVg-pseudotyped HIV, and therefore need to use a huSlfn11-deficient CD4⁺ T cell line. Our HIV/AIDS core facility (which performs these experiments on a recharge basis) routinely uses CEM cells to quantitate HIV replication. We have determined that huSlfn11 expression in CEM cells is approximately equal to that in human PBMCs, and we have created huSlfn11-deficient CEM cells using the same shRNA construct we used to knock down huSlfn11 in HEK293 cells. As shown in FIG. 13, a pilot replications kinetic study of WT HIV_{LAI} in CEM, CEM-Slfn11^{shRNA} and CEM-Ctl^{shRNA} cells lends further support to a potent antiviral activity of huSlfn11. We will confirm our findings in 293 cells relating to the effects of huSlfn11 to intracellular HIV protein and vRNA levels in these CEM cells. We will also test different HIV-1 strains as well as HIV-2 to determine whether different susceptibility to huSlfn11 exists between these viruses.

[0243] 3.1 c) Investigate Whether a Functional Murine Homolog to huSlfn11 Exists—

[0244] Retroviruses are not unique to primates, and it is therefore likely that a functional homolog to huSlfn11 exists in the mouse. Five long muSlfns exist with approximately equal sequence similarity to huSlfn11 (muSlfn 5, 8, 9, 10 & 14) and it is possible that one of these proteins is capable of inhibiting retrovirus production including HIV. We have already generated plasmids encoding muSlfn2, 3, 8, 9 and 10, and are in the process of cloning the remaining family members. If we find an anti-retroviral muSlfn, it will serve as the basis for the future generation of knock-out mice (while this would be certainly our next goal, we believe that in the absence of further evidence it is beyond the scope of this application). If we find that none of the muSlfns exhibit anti-retroviral activity, it will provide us with important information regarding the functional domains of Slfn proteins, as murine and human Slfns are well conserved. It is also intriguing to theorize that HIV has evolved countermeasures against huSlfn11 (aim 3.2), which might be ineffective against a murine Slfn11 homolog (species-specific effects of host cells proteins have already been demonstrated, e.g for TRIM5α (49)). As such, an unopposed murine Slfn family member could contribute to the block of HIV replication in murine cells, and a better understanding of this process will bring the field one step closer to a mouse model of HIV infection.

[0245] 3.2 a) Determine Whether Virus-Encoded Slfn Proteins Act Dominant-Negative Over huSlfn11—

[0246] The only non-mammalian ‘organisms’ that encode slfn-like proteins are all members of the Pox-viruses including among others cowpox, camelpox, mousepox etc. (50, 51). As illustrated in FIG. 1, the viral Slfns resemble in sequence and length most closely the short murine Slfns 1 and 2, which are absent in humans. Interestingly, bioinformatic analysis revealed a fragmented structure of the vSlfn genes of the human-tropic variola and vaccinia virus strains, precluding the expression of a ‘full-length’ vSlfn, but not necessarily excluding the possibility of the expression of shorter proteins. In contrast, the genomic sequence of the poxvirus Molluscum contagiosum virus (MCV), a very common cause of viral skin and mucous membrane infection, does not disqualify the virus from expressing a vSlfn protein. As vSlfn genes are present in all poxvirus genomes regardless of species specificity, it is likely that these proteins benefit the virus at some level. Even though vSlfns are not found in retroviruses, we are interested in determining their potential function as dominant-negative mutants over huSlfn11, as this might be of relevance in the context of opportunistic co-infection. We will therefore test whether vSlfn from MCV, or predicted truncated vSlfns of vaccinia and variola viruses, can attenuate the anti-retroviral properties of huSlfn11. This will be done in transient expression systems using replication-deficient retroviruses to avoid biosafety concerns. These studies will not only provide valuable insights into the role of vSlfn proteins in potentially promoting retroviral infection, but the sequence disparities between human and viral Slfns will also identify elements in Slfn proteins that are crucial to their function.

[0247] 3.2 b) Assess Whether HIV-Encoded Proteins can Counteract the Anti-Retroviral Effect of Slfn11—

[0248] The innate antiviral mechanisms that are working against HIV, a relatively new human infection, evolved to select against ancient retroviral infection (52). In opposition, an array of HIV “accessory” genes (vif, vpu, vpr, and nef) that serve to evade or subvert the various forms of innate immunity evolved. For example, HIV Vif effectively antagonizes the antiviral effects of the APOBEC3 family of editing enzymes, whereas HIV Vpu counteracts another interferon-induced restriction factor, BST2, to facilitate HIV release from the cell membrane (25). By interfering with the host cell mechanisms involved in intracellular signaling, HIV is able to establish an intracellular niche and persist. In our studies we observed that the inhibitory effect of huSlfn11 on virus production after MSCV-IRES-GFP & pCL-Eco vector cotransfection is consistently more pronounced than when pNL43LucR⁺E⁻HIV & pCMV-VSVg Env plasmids are introduced to generate HIV particles (see FIGS. 3 & 4). The latter plasmids encode all HIV proteins except env and nef, and it is possible that a viral protein counteracts the antiviral effects of huSlfn11. A pilot experiment of cotransfection of pNL43LucR⁺E⁻HIV together with the MSCV-IRES-GFP & pCL-Eco vectors yielded increased MSCV titers, suggesting that the weaker antiviral effect of huSlfn11 on HIV compared to MSCV production is not intrinsic to the VSVg-HIV system, but can be caused ‘in trans’ by the presence of pNL43LucR⁺E⁻HIV. We hypothesize that if HIV indeed directly counteracts Slfn11, then it is likely to do so through one of the other non-structural proteins that are well-recognized virulence factors (Vpr, Vif, or Vpu). We will test their ability to attenuate huSlfn11 function. If we identify a viral huSlfn11 antagonist among these proteins, we will continue by determining its mode of action (e.g. degradation or re-sequestration of huSlfn11). In the case of a negative outcome, we will systematically delete individual coding regions from the pNL43LucR⁺E⁻HIV vector. Cotransfection of these deletion mutants with the MSCV-IRES-GFP & pCL-Eco vector system and subsequent analysis of MSCV titers will allow us to pinpoint the element(s) of HIV that antagonize huSlfn11 function (note: as we do not intend to measure HIV production, we do not need to be concerned about possible detrimental effects of such deletions on HIV particle formation).

[0249] 3.2 c) Explore Whether Reported SNPs of Slfn11 Affect its Efficacy as a Retroviral Restriction Factor—

[0250] As an ancient antiviral defense mechanism, the innate immune response is a collection of functionally distinct subsystems that have evolved to counter infection by viruses. Studies of mechanisms by which HIV evades the antiviral innate immune responses provide the scientific impetus to characterize the genetic polymorphisms that can affect components of the host signaling pathways. Compelling evidence for a genetic basis for the variation observed in human populations in HIV/AIDS susceptibility has come from the analysis of the highly protective CCR5 Δ32 allele, various haplotypes of the promoter for CC chemokine receptors, selected human leukocyte antigen (HLA) alleles, and specific interactions between killer cell immunoglobulin-like receptors (KIR) and HLA class I ligands in HIV/AIDS susceptibility. Thus, natural variations in the expression levels or sequences of host restriction factors that have intrinsic antiviral ability such as huSlfn11 can impact HIV replication. The NCBI SNP database reports 241 SNPs in huSlfn11, and we hypothesize that some of these sequence divergences may have emerged due to altered efficacy of these huSlfn11 variants against retrovirus/HIV production. With the assistance of the UCSD HIV/AIDS Bioinformatics and Genomics core we will analyze whether these SNPs are localized in ‘hot-spots’, or are found in sequences that we identify as critical functional domains in Aim 1. In that case we will introduce these “mutations” into the huSlfn11 expression vector and test the antiviral ability of the mutants. Cluster analysis and the results from Aim 1 will allow us to limit the number of mutants to be tested. We do not anticipate any technical problems with these experiments, as we routinely produce point mutants on a large scale (e.g. we just generated a series of 55 K->R mutants of STAT1). While this subaim represents a small scale screening effort rather than a specifically targeted experiment, we believe that the data obtainable from this subaim will provide a foundation for future studies using primary patient samples and clinical data to determine a prospective role of huSlfn11 SNPs in disease progression. Identification of SNPs affecting huSlfn11's function as an HIV restriction factor will not only provide a better understanding of the functional elements of huSlfn11, but also carries potential as a diagnostic determinant of HIV/AIDS susceptibility.

[0251] Most of the studies outlined in this application will be using HEK293 cell lines, as we already extensively characterized the antiviral mechanism of huSlfn11 in this cell system and it clearly provides numerous advantages for the proposed mechanistic experiments (e.g. availability of large numbers of easily transfectable cells, and the existence of complimentary “matched” cell lines). Naturally, we intend to verify and confirm all seminal findings in the CEM cell-based experimental setup as described in FIG. 13, and whenever feasible in primary CD4⁺ lymphocytes isolated from PBMCs.

### Example 5

### Methods Used in Examples 6-15

[0252] Plasmids and Antibodies.

[0253] huSlfn5 and huSlfn11 were cloned into pcDNA6/V5-His. PCR fragments of huSlfn11 were cloned into pcDNA6/V5-His to generate huSlfn11N (aa 1-579) and huSlfn11C (aa 523-901). The pNL4-3.Luc.R⁺E⁻ HIV-1 vector has been described previously²⁸. huSlfn11 antibodies were from Sigma and Abmart. pNL4-3-DEnv-EGFP, pNL-GFP-RRE(SA) and antibodies against HIV-1 proteins were obtained through the NIH AIDS Research and Reference Reagent Program. Generation of Gag^{vir}, Gag^{opt} and (E)GFP vectors is in Methods. pLKO.1 shRNA lentivirus constructs were from Open Biosystems.

[0254] Virus Production and Titer Assays.

[0255] HIV production was determined by transfection of pNL4-3.Luc.R⁺E⁻ and pCMV-VSV-G into cells of interest. Supernatants were used to spin-infect HEK293T cells, and luciferase was measured by Bright-Glo Luciferase Assay (Promega). p24 ELISAs were performed at the Center for AIDS Research, UCSD using Alliance p24 ELISA kits (Perkin Elmer).

[0256] HIV Replication Kinetics.

[0257] Wildtype X4 strain of HIV-1_{LAI} was used to inoculate CEM, CEMshRNA^{Ctl} and CEMshRNA^{Slfn} cells at an MOI of 0.01, and viral titers were measured by p24 ELISA.

[0258] Cell Culture.

[0259] HEK293, HEK293T, NIH3T3, Hela, HFF (Human Foreskin Fibroblasts) and their derivative cells were maintained in high glucose DMEM. CEM and their derivative cells were maintained in RPMI 1640 medium. Both media were supplemented with 10% heat-inactivated fetal bovine serum, 100 U/ml Penicillin, 100 μg/ml Streptomycin, 2 mM L-Glutamine, MEM Non-essential Amino Acid, 1 mM Sodium Pyruvate and 55 μM 2-Mercaptoethanol. The Phoenix amphotropic retrovirus packaging cell line (293T) originates from the lab of Dr. G. Nolan (Stanford University, Stanford, Calif.). Human PBMCs were obtained from the San Diego Blood Bank.

[0260] Plasmids.

[0261] The template vectors encoding huSlfn5 and huSlfn11 sequences were acquired from Open Biosystems (Human MGC Verified FL cDNA (IRAU), clone ID 40123369 and 6258140). The coding sequences were amplified by PCR with PfuUltra (Stratagene) and subcloned into the pcDNA6/V5-His vector (Invitrogen) for mammalian cell expression. Partials of the hSlfn11 coding sequence were amplified by PCR and subcloned into the pcDNA6/V5-His vector to generate the huSlfn11N (1-579) and hSlfn11C (523-901) truncation mutants. The pcDNA6/V5-His CAT (Chloramphenicol Acetyl Transferase) vector was generated the same way using pcDNA5/FRT/TO CAT (Invitrogen) as the PCR template for the CAT sequence. The following plasmids were obtained from the addgene plasmid repository (Cambridge, Mass.): MSCV-IRES-GFP (Addgene plasmid 20672: source David Baltimore); pCL-Eco retrovirus packaging vector (Addgene plasmid 12371: source Inder Verma); psPAX2 lentivirus packaging vector (Addgene plasmid 12260: source Didier Trono); pMD2.G helper vector (Addgene plasmid 12259: source Didier Trono) and pCMV-VSV-G vector (Addgene plasmid 8454: source Robert M. Weinberg). The following plasmids were obtained through the NIH AIDS Research and Reference Reagent Program, Division of AIDS, NIAID, NIH: pNL-GFP-RRE(SA)(Cat#11466) from Dr. John Marsh and Dr. Yuntao Wu, pNL4-3-deltaE-EGFP (Cat#11100) from Drs. Haili Zhang, Yan Zhou, and Robert Siliciano. The pNL4-3.Luc.R⁺E⁻ HIV-1 vector has been described previously²⁸. The pNL4-3.Luc.R⁺E⁻PRstop construct was created by deletion of Thymidine₂₄₇₈ in pNL4-3.Luc.R⁺E⁻ HIV-1 to put the following ‘TAGTAG’ into frame such that no pol-encoded viral enzyme proteins would be expressed. Gag^{vir} and Gag^{opt} constructs: Gag sequences were cloned into pcDNA6/V5/His between Afl II and Xho I sites. Nine base pairs of the wild-type viral sequence preceding the initiation codon were present in both final constructs to assure identical translation initiation sites. Gag^{vir} was generated through PCR amplification of the gag sequence from pGag-EGFP (NIH AIDS Research & Reference Reagent Program, #11468) in which only the Inhibitory RNA sequence (INS) was eliminated through introduction of silent mutations while otherwise retaining the original viral codon usage. Gag^{opt} was generated through PCR amplification of the gag sequence from p96ZM651gag-opt (NIH AIDS Research & Reference Reagent Program, #8675) in which the entire gag sequence was converted to employ codon usage in line with highly expressed human genes. GFP and EGFP sequences were cloned into pcDNA6.2/V5 using the pcDNA6.2/GW/D-TOPO kit (Invitrogen). The GFP sequence was tagged with a V5 epitope while the EGFP sequence was tagged with a Myc tag (GAG CAG AAG CTG ATC AGC GAG GAG GAC CTG). The GFP sequence used retains most of the original wild type protein sequence. The EGFP sequence contains more than 190 silent base changes following human genes codon-usage preferences. Sequences flanking both GFP and EGFP translation initiation site have been converted to a Kozak consensus translation initiation site (C ACC ATG GTG AGC . . . ) to ensure identical translation initiation efficiency in eukaryotic cells.

[0262] shRNA Constructs.

[0263] The pLKO.1 shRNA lentivirus constructs (TRCN0000148990, TRCN0000152230, TRCN0000155578, TRCN0000157747, TRCN0000152057, TRCN0000155564) against huSlfn11 were obtained from The RNAi Consortium via Open Biosystems (Huntsville, Ala.). Construct TRCN0000148990 (CCGGGCTCAGAA TTTCCGTACTGAACTCGAGTTCAGTACGGAAATTCTGAGCTTTTTTG) produced maximum huSlfn11 knock-down at the protein level and was thus designated as huSlfn11 shRNA in this study. pLKO.1-Blasticidin construct was created by replacing Puromycin resistance gene of the original pLKO.1 construct with Blasticidin resistance gene utilizing BamHI and KpnI sites. The control shRNA construct in the same pLKO.1 vector system (CCGGTGAAGAACTAACCCGGGACTTCTCGAGAAGTCCCGGGTTAGTTCTTCATTTTT G) was also obtained from The RNAi Consortium via Open Biosystems and does not match any human genes.

[0264] Antibodies.

[0265] Anti-huSlfn11 antibody for immunoblotting was purchased from Sigma Life Sciences (Atlas Antibodies). Monoclonal anti-huSlfn11 antibody for supershift experiments was custom-generated by Abmart. Murine anti-V5 antibody (E10) antibodies were from eBiosciences and Santa Cruz Biotechnology, respectively. Goat polyclonal anti-luciferase antibody was obtained from Promega, Rabbit anti-GFP (D5.1) and rabbit anti-GAPDH monoclonal antibodies (14C10) were acquired from Cell Signaling Technology. The following antibodies were obtained through the AIDS Research and Reference Reagent Program, Division of AIDS, NIAID, NIH: Monoclonal antibody against HIV-1 Gag/p24 (AG3.0) from Dr. Jonathan Allan; anti-HIV-1 RT monoclonal antibody (8C4) from Dr. Dag E. Helland; anti-HIV-1 Vif monoclonal antibody (#319) from Dr. Michael H. Malim; anti-HIV-1 Vpr (1-50) antibody from Dr. Jeffrey Kopp; rabbit anti-HIV-1_{NL4-3} Vpu antiserum from Dr. Klaus Strebel, and anti-HIV-1 Nef (Ag11) monoclonal antibody from Dr. James Hoxie.

[0266] Quantitative PCR and Primers.

[0267] Total cellular RNA was extracted with QIAGEN RNeasy Mini Kits, and virion RNA in culture supernatants was extracted with QIAGEN QIAamp Viral RNA Mini Kits. Cytoplasmic RNA was prepared with QIAGEN RNeasy Mini Kits following the manufacturer's protocol. Briefly, freshly harvested cells were gently lysed on ice for 5 min in buffer RLN (50 mM Tris.Cl, pH 8.0, 140 mM NaCl, 1.5 mM MgCl₂, 0.5% (v/v) IGEPAL CA-630, 1000 U/ml RNasin® Plus RNase Inhibitor (Promega) and 1 mM DTT). Intact Cell nuclei were removed by centrifugation at 4° C. for 2 min at 300×g, and cytoplasmic RNA was extracted from the remaining supernatant. RNA was cleaned using Ambion DNA-free Kits and reverse transcribed with Applied Biosystems' High Capacity cDNA Reverse Transcription Kit. qPCR was performed on Applied Biosystems 7000 Sequence Detection System or Applied Biosystems StepOnePlus Real-Time PCR System using Power SYBR Green PCR Master Mix. Relative RNA level were calculated after normalization to 18S rRNA unless specified otherwise. The following primer sequences in Table 2 were used in these assays:

TABLE 2
Primer Sequences

| Target Gene | Forward Primer | Reverse Primer |
|---|---|---|
| huSlfn5 | caagcctgtgtgcattcataa | tctggagtatataccactctgtctgaa |
| huSlfn11 | aaggcctggaacataaaaagg | ggagtatatcgcaaatatcctggt |
| huSlfn12 | ctttgttcaacacgccaaga | atgcagtgtccaagcagaaa |
| huSlfn13 | gagaaaatgatggacgcagat | agactcaaaggcctcagcaa |
| huSlfn12L | gaaagtcagtttctgaggaatttca | ccagctcagcatagtttgtgtc |
| huSlfn14 | ggtggtcatgatgctggata | tgatgaaatcaggcaagagttg |
| hISG54 | tggtggcagaagaggaagat | ccaaggaattcttattgttctcact |
| hTBP | gctggcccatagtgatcttt | cttcacacgccaagaaacagt |
| h18S rRNA | ggatgcgtgcatttatcaga | gttgatagggcagacgttcg |
| GFP | ctggagttgtcccaattcttg | tcaccctctccactgacaga |
| EGFP | cagcagaacacccccatc | tgggtgctcaggtagtggtt |
| Luciferase | aggtcttcccgacgatga | gtctttccgtgctccaaaac |
| HIV p24 | tgcatgggtaaaagtagtagaagaga | tgataatgctgaaaacatgggta |

[0268] Generation of Stable huSlfn11 Knock-Down HEK293 and CEM Cell Lines.

[0269] HEK293T cells were transfected with the huSlfn11 shRNA or control lentivirus vector and the lentivirus packaging vectors psPAX2 and pMD2.G using Lipofectamine 2000 (Invitrogen) according to the manufacturer's protocol. The cell culture medium was collected and replaced with fresh medium 48, 72 and 96 hours after the transfection. The combined supernatants were cleared by centrifugation at 1,000 g at 4° C. for 15 minutes. To generate stable huSlfn11 knock-down HEK293 cell lines, cleared supernatants were added to pre-plated HEK293 cells in the presence of 8 μg/ml polybrene and centrifuged at 600 g for 90 minutes at room temperature. After 48 hours, infected cells were subject to resistance selection with 2 μg/ml puromycin. The efficiency of huSlfn11 knock-down in the selected cells was assayed by qPCR and immunoblotting. To generate stable huSlfn11 knock-down CEM cell lines, cells were first infected and selected as outlined above. Although the same shRNA construct was used, knock-down in CEM cells was less efficient when compared to HEK293 cells. To improve the huSlfn11 knock-down in CEM cells, puromycin-selected CEM cells were re-infected with the pLKO.1-Blasticidin construct carrying the same shRNA and subject to resistance selection with 15 μg/ml blasticidin and 2 μg/ml puromycin. Such double-selected cells displayed a >90% knock-down of huSlfn11 (see FIG. 17b).

[0270] Assay for MSCV, HIV and AAV Production.

[0271] To analyze MSCV retrovirus production, MSCV-IRES-GFP (MIG) plasmid and pCL Eco packaging vector were transfected into the cells of interest using Lipofectamine 2000 (Invitrogen) according to the manufacturer's instructions. After 24 hours the cells were moved to 32° C., and supernatants were collected after 24 hours and cleared by centrifugation. Transfection efficiency was determined by analysis of GFP-expression in the cells and was subsequently incorporated into the virus titer calculations. The amount of (infectious) virus particles in the supernatants was determined by both infection assays and qPCR analysis of viral RNA. For infection assays, pre-plated NIH3T3 cells were spin infected with 10-fold serially diluted supernatants in the presence of 8 μg/ml polybrene at 600 g for 90 minutes at room temperature. 48 hours after the spin infection, the NIH3T3 cells were examined for GFP expression by flow cytometry, and the number of GFP⁺ cells was used to calculate relative viral titers. For viral RNA qPCR assays, viral RNA was extracted from the virus supernatant and quantitated as described above with EGFP-specific primers. The production of HIV was tested similarly after pNL4-3.Luc.R⁺E⁻ HIV vector, pCMV-VSV-G vector and pcDNA5 GFP vector were transfected into cells of interest using Lipofectamine 2000. The transfection efficiency was established by flow cytometric determination of the number of GFP cells and used to adjust relative viral titers. Viral titers were determined via infection assays, qPCR of viral RNA and HIV p24 ELISA. The infection assay was similar to the MSCV virus infection assay except HEK293T cells were used for analysis. Expression of luciferase was measured by using the Bright-Glo Luciferase Assay System (Promega) and a microplate luminometer (LUMIstar, BMG-LABTECH) 24 hours after the spin infection. HIV viral RNA was quantitated by qPCR using luciferase- or HIV p24-specific primers. The HIV p24 ELISA was performed by the Viral Pathogenesis Core at the UCSD Center for AIDS Research using Alliance HIV1 p24 ELISA kits (Perkin Elmer). For recombinant AAV production assays, cells were transfected with pXX6 (0.6 μg), pXX2 (0.2 μg) and pACLALuc (0.2 μg) using lipofectamine 2000 (Invitrogen), and harvested 72 h after transfection. rAAVLuc-containing lysates were generated by freeze/thaw cycles followed by centrifugation and were used to infect HEK293T cells. Luciferase activity was quantified 48 h post-transduction using Steady-Glo luciferase substrate reagent (Promega) in 96-well Lumiplates (Greiner Bio-One) in a TopCount NXT scintillaton and luminescence counter (PerkinElmer).

[0272] Assays for MSCV and HIV Infection.

[0273] Amphotropic MSCV-IRES-GFP (MIG) retrovirus was prepared by transfecting Phoenix amphotropic retrovirus packaging cells with MSCV-IRES-GFP (MIG) vector using Lipofectamine 2000. The cell culture medium was collected and replaced with fresh medium 48, 72 and 96 hours after the transfection. The combined supernatants were cleared by centrifugation at 1,000 g at 4° C. for 15 minutes. Cells to be tested were spin infected with the indicated dilutions in the presence of 8 μg/ml polybrene at 600 g for 90 minutes at room temperature. 48 hours after the spin infection, cells were analyzed for GFP expression by flow cytometry. Infection efficiency was established by both the number of GFP⁺ cells and the level of GFP expression. VSV-G pseudotyped HIV was prepared by transfecting HEK293T cells with pNL4-3.Luc.R⁺E⁻ HIV and pCMV-VSV-G vectors using Lipofectamine 2000. The cell culture medium was collected and cleared as described above. Cells to be tested were spin infected with the indicated dilutions in the presence of 8 μg/ml polybrene at 600 g for 90 minutes at room temperature. 24 hours after the spin infection, luciferase expression was measured to determine the relative infection efficiencies.

[0274] Transmission Electron Microscopy.

[0275] HEK293T cells were transfected with pNL4-3.Luc.R⁺E⁻ HIV vector together with either pcDNA6/V5-His CAT or pcDNA6/V5-His huSlfn11 vectors using Lipofectamine 2000. 48 hours after the transfection, cells were fixed and processed by the Microscopy Core at the Scripps Research Institute. Images were acquired with a Philips CM100 transmission electron microscope.

[0276] Whole Cell Lysis and Western Blotting.

[0277] Cells were lysed directly in 1×NuPAGE LDS Sample Buffer (Invitrogen) containing 2.5% 2-mercaptoethanol and heated at 90° C. for 5 min. Samples were homogenized by QIAshredder (Qiagen), total protein resolved by NuPAGE (Invitrogen) and transferred to PVDF membranes followed by Western blotting with the specified antibodies. Corresponding HRP-conjugated secondary antibodies and Amersham ECL Plus Western Blotting Detection Reagent (GE Healthcare) were used to visualize the signals followed by quantification using densitometer and NIH ImageJ64 software. Alternatively, fluorochrome-conjugated secondary antibodies were used and signals were acquired and quantified using Typhoon Trio™ Variable Mode Imager and ImageQuant software.

[0278] Wild-Type HIV Virus Replication Assay in CEM Cells.

[0279] HIV-1_{LAI} was used to infect the CEM stable cell lines (CEM, CEMshRNA^{Ctl} and CEMshRNA^{Slfn}) at an MOI of 0.01 in 5 ml of culture at 0.5×10⁶ cells/ml using RPMI/poly medium containing 3 μg/ml polybrene, 1% glutamine, 100 U/ml Penicillin, 100 μg/ml Streptomycin and 10% FBS. The cultures were sampled at the indicated time points and the viral titers were measured by HIV p24 ELISA.

[0280] tRNA Arrays. mirVana miRNA Isolation Kit (Ambion) was used to prepare total RNA from freshly harvested cells following the total RNA isolation protocol. RNA samples were labelled and the relative abundances of individual tRNAs were measured using microarrays as previously described^{25,26}.

[0281] tRNA Electrophoretic Mobility Shift Assay (EMSA).

[0282] The partial coding sequence of human Slfn11 (a.a. 1-579; huSlfn11N) and the coding sequence of GFP were cloned into the bacterial expression vector pET101/D-TOPO (Invitrogen) with a 6×His epitope tag. 6×His-tagged huSlfn11N and GFP proteins were expressed in Origami B E. coli cells and purified over Ni-NTA and FPLC columns. The purity of the proteins was >95% as estimated by Coomassie Blue Staining. Total human tRNA was extracted with the mirVana miRNA Isolation Kit (Ambion) following the small RNA isolation protocol, and further purified on a 15% denaturing polyacrylamide TBE-Urea Gel (Invitrogen). To generate EMSA probes, purified human tRNA was deacylated to remove charging amino acid, dephosphorylated and 5′-labeled using ³²P-ATP. Total yeast tRNA was purchased from Invitrogen. To prepare the HIV viral RNA, the sequence corresponding to the gag-pol frame-shifting region (2041-2161, pNL4-3.Luc.R⁺.E⁻ vector) was amplified by PCR with T7 promoter-containing primers and in vitro transcribed using MEGAscript T7 Kit (Ambion). Purified proteins, unlabeled competitor RNA or anti-huSlfn11 antibody (Abmart), and probe were combined as specified and incubated on ice for 30 minutes in EMSA buffer (5% glycerol, 10 mM pH7.4 Tris-HCl, 5 mM MgCl₂, 100 mM KCl, 1% Triton X-100, 1 mM DTT and 1U/μl RNasin Plus RNase Inhibitor). After samples were resolved on a 6% DNA Retardation Gel (Invitrogen), the gel was dried and visualized with Typhoon Trio™ Variable Mode Imager (Storage Phosphor Mode).

[0283] Data Analysis and Presentation.

[0284] Unless indicated otherwise, results are presented in graphs as avg+/−s.d. of at least three independent transfections or infections. For Western blots, a representative of at least three independent transfections or infections is shown. For the experiments shown in FIGS. 16d and e, GFP and EGFP protein and mRNA levels were quantitated and adjusted to the corresponding GAPDH protein or mRNA concentrations, respectively. Expression levels of the proteins were then normalized to their corresponding standardized mRNA concentrations to compensate for minor variations in mRNA concentrations between the samples.

### Example 6

[0285] LPS, poly-IC or IFNα/β treatment of macrophages results in induction of several muSlfn genes. Treatment of HFFs with IFNβ, poly-IC or poly-dAdT revealed similar induction of Slfn genes (FIG. 18a), and huSlfn5 and huSlfn11 were consistently the most prominent family members (FIG. 18b). Notably, we observed a striking difference in huSlfn levels between HEK293 (293) and HEK293T (293T) cells (FIG. 18b), and exploited this differential expression to focus on huSlfn11 for further studies. We further employed huSlfn11 shRNA to generate stable 293 cells that specifically lack huSlfn11 expression (293shRNA^{Slfn}) (FIGS. 18c and d).

### Example 7

[0286] To test whether lack of huSlfn11 in 293shRNA^{Slfn} or 293T cells alters their ability to subdue viral infections, we infected these cells with VSV-G pseudotyped HIV (HIV^{VSV-G}), or amphotropic Murine Stem Cell Virus (MSCV), Adeno-associated Virus (AAV), or Herpes Simplex Virus (HSV). HIV^{VSV-G}-infected cells expressed luciferase after integration of the viral cDNAs into the host genome. Regardless of huSlfn11 expression, all cell lines displayed comparable luciferase levels after HIV^{VSV-G} infection (FIG. 19). A similar lack of influence of huSlfn11 was observed when cells were infected with MSCV, AAV or HSV.

### Example 8

[0287] HEK293T cells are used as packaging cells for production of retroviruses, and we therefore considered the possibility that virus production rather than the response towards them is afflicted by huSlfn11. Indeed, 293T cells produced dramatically higher HIV^{VSV-G} (FIG. 14b) or MCSV (FIG. 20a) titers than 293 cells from the viral vectors pNL4-3.Luc.R⁺E⁻ or MSCV-IRES-GFP, respectively. Most importantly, this increase in viral titer was also clearly evident in 293shRNA^{Slfn} cells, whereas 293 and 293shRNA^{Ctl} cells produced the same low levels of virus (FIG. 14b and FIG. 20a). Strikingly, the modulation of virus production is limited to particular viruses, as fabrication of retroviruses (FIG. 14b and FIG. 20a) but not of AAV (FIG. 20c) was affected by huSlfn11. We also did not observe any modulation of ISGs such as ISG15, ISG54 or APOBEC3G as a consequence of huSlfn11 expression, supporting the notion that huSlfn11 does not create a general virus-resistant phenotype.

### Example 9

[0288] To corroborate that the observed differences are attributable to dissimilar huSlfn11 expression, we expressed huSlfn11 (aa 1-901) in 293T cells and analyzed their ability to produce HIV^{VSV-G}. Indeed, huSlfn11 radically inhibited HIV^{VSV-G} (FIG. 14a) or MSCV (FIG. 20b) production from 293T cells, with the inhibitory activity residing in the AAA-domain-containing, NH2-terminal region (huSlfn11-N; aa 1-579). No effect of the isolated COOH-terminal region (huSlfn11-C; aa 523-901) harboring the putative helicase sequence was observed (FIG. 14a, FIG. 20b). Surprisingly, huSlfn5 failed to inhibit retrovirus production but yielded slightly elevated viral titers, illustrating specificity among Slfn proteins in their antiviral activity.

### Example 10

[0289] To discern whether huSlfn11 reduced the number or the viability of released virus, we measured p24 capsid and viral RNA (vRNA) levels in supernatants of pNL4-3.Luc.R⁺E⁻ transfected, HIV^{VSV-G}-producing cells. Extracellular p24 (FIGS. 14c and d) or vRNA (FIGS. 14e and f) concentration patterns closely matched the titer results from infection assays, demonstrating that huSlfn11 diminishes the number of viral particles released from the cells.

### Example 11

[0290] To assess a possible reduction of intracellular vRNA, we determined its levels in 293T cells expressing CAT, huSlfn5, huSlfn11, huSlfn11-N or huSlfn11-C (FIG. 14g), as well as in 293, 293shRNA^{Ctl} and 293shRNA^{Slfn} cells (FIG. 14h). In contrast to the pronounced variations in extracellular vRNA, only insignificant differences in intracellular vRNA were evident among those cells. We also analyzed vRNA in the cytoplasmic fraction specifically, as nuclear export of unspliced vRNA is a hallmark of retroviral RNA processing^{6,7,8}, but again found no significant alterations attributable to huSlfn11 (FIG. 21a).

[0291] Unlike in BST-2 expressing cells^{9,10} electron-microscopic analysis failed to document accumulation of virions inside or on the surface of virus-producing cells in the presence of huSlfn11 (FIG. 21b). As such, huSlfn11 greatly diminishes the formation of viral particles inside the cell, despite the fact that vRNA is equally available. When the two cell sets were analyzed for the expression of viral proteins encoded by pNL4-3.Luc.R⁺E′, we noted a profound effect of huSlfn11 on p55 Gag and p24 capsid proteins¹¹ (FIGS. 15a and b). To create a clearer picture of the effect of huSlfn11 on p55, we abolished expression of the viral protease by introducing a stop-codon into pro in pNL4-3.Luc.R⁺E⁻. p24 could no longer be detected, however, modulation of p55 expression by huSlfn11 was clearly present (FIG. 22a). As with gag-derived proteins, huSlfn11 had a striking effect on the protein levels of RT, Vif, Vpu and Vpr (FIGS. 15a and b). Surprisingly, we did not observe any reduction of EGFP derived from a co-transfected vector, or of GAPDH (FIGS. 15a and b, bottom), indicating that the limited viral protein production is not due to a global shutdown of protein synthesis.

[0292] Even more surprising was that luciferase expression, coded in pNL4-3.Luc.R⁺E⁻ in place of nef, was mostly impervious to huSlfn11 (FIG. 15c, top), contrasting the huSlfn11-mediated diminishment of other proteins encoded on this vector. Strikingly, Nef expression was inhibited by huSlfn11 in the context of pNL4-3-DEnv-EGFP, which has part of env replaced by EGFP, but retains nef in its original position. (FIG. 15c, bottom). Without limiting the invention to any particular mechanism, the inventors conclude that huSlfn11 selectively suppresses viral protein expression via transcript-intrinsic properties rather than external factors or positional elements. This notion is further corroborated by the fact that huSlfn11 had no effect on RRE-mediated events such as nuclear export of unspliced vRNA (FIG. 22b).

### Example 12

[0293] Viral genomes display biased nucleotide compositions different from human genes^{12,13,14,15,16,17,18}. Extremely high frequencies of A nucleotides are found in the RNA genomes of lentiviruses and influenza virus^{13,17,19,20}. Wild-isolates of HIV-1, particularly gag and pol sequences, are characterized by low GC content and suboptimal codon usage compared to the host cell preference^{14,21,22,23,24}. The unusual rare codon bias favors A/U in the third position, which induces ribosome pausing and inefficient translation. As the inhibitory effect of huSlfn11 on viral protein expression is intrinsic to the transcripts, we contemplated that huSlfn11 exploits viral codon preferences to specifically attenuate viral protein synthesis. We therefore generated vectors containing only the ORF of HIV-1 gag with either viral codon-bias (Gag^{vir}), or synonymous substitutions optimizing for human cell expression (Gag^{opt}). As evidenced in FIG. 15d, huSlfn11 strongly affected expression of Gag^{vir}, but was without consequence for Gag^{opt} expression. Differences in translation initiation are not likely, as both Gag^{vir} and Gag^{opt} contain the same translation start sequences. Without limiting the invention to any particular mechanism, the inventors are of the view that, this finding strongly suggests that huSlfn11 is exploiting the distinct viral codon bias to selectively attenuate the expression of viral proteins.

### Example 13

[0294] Previous reports indicated changes in cellular tRNA levels after HIV infection²⁰, prompting us to investigate whether huSlfn11 alters the tRNA composition in the absence or presence of HIV. Utilizing tRNA-arrays^{25,26}, we observed little to no changes in tRNA levels as a consequence of huSlfn11 expression (FIG. 16a, left column). However, while HIV triggered substantial changes in tRNA concentrations in huSlfn11-knock-down cells, no changes were observed in the presence of huSlfn11 (FIG. 16a, middle and right). Thus, huSlfn11 counteracts HIV-induced changes in tRNA composition, presumably initiated to promote viral protein synthesis. To test whether huSlfn11 interacts directly with tRNA, we utilized human tRNA as EMSA probe with FPLC-purified His-huSlfn11N. As shown in FIG. 16b, huSlfn11N produced a clear shift of the tRNA in a dose-dependent manner. The shifted band was competed with unlabeled tRNA, but not in-vitro transcribed vRNA (FIG. 16b), and was disrupted by an antibody against huSlfn11 (FIG. 16c). To determine whether huSlfn11 has binding preference for particular tRNAs, we performed EMSAs with increasing amounts of huSlfn11N to obtain ˜50% shifting efficiency (FIG. 23). When the shifted (S), unshifted (U) and total tRNA (T) bands were isolated and recovered tRNAs hybridized to tRNA arrays, no enrichment of particular tRNAs in the shifted band was noticeable (FIG. 23), suggesting a lack of discerning binding preference of huSlfn11N.

### Example 14

[0295] The above results led to the premise that any protein that employs similar codon usage as HIV would be modulated by HIV and/or huSlfn11. To unequivocally demonstrate that codon-bias rather than cryptic regulatory elements in gag accounted for the influence of huSlfn11, we tested this hypothesis using non-viral proteins. Natural GFP harbors similar codon-bias as HIV, whereas EGFP has been optimized for mammalian expression by substituting synonymous codons of highly expressed human genes throughout the GFP-ORF²². The data show that co-transfection of pNL4-3.Luc.R⁺E⁻ with V5-tagged GFP and Myc-tagged EGFP in the absence of huSlfn11 resulted in increased GFP, but not EGFP, expression. Most importantly, huSlfn11 inhibited the expression of GFP in a manner identical to viral proteins, whereas EGFP was largely refractory to suppression by huSlfn11 (FIGS. 16d and e). As (E)GFP protein levels have been normalized to their respective mRNA levels (FIG. 16e), and without limiting the invention to any particular mechanism, the inventors conclude that any differences in GFP expression are the consequence of altered protein synthesis rather than variations in transcription or mRNA stability.

### Example 15

[0296] Finally, to demonstrate that the anti-retroviral effects of huSlfn11 are not limited to a system employing HIV^{VSV-G} and 293 cells, we utilized CEM cells, a T-cell line widely used to assess HIV replication kinetics. Human PBMCs display similar levels of huSlfn11 after IFNβ stimulation as CEM cells (FIG. 17a). Control or huSlfn11-directed shRNAs were employed to generate stable CEM variants (FIG. 17b), and the resulting CEMshRNA^{Ctl} and CEMshRNA^{Slfn} cells and parental CEM cells were infected with wild-type X4-HIV-1_{LAI}, and viral replication was assessed via p24 ELISA of the supernatants. The data show that CEM and CEMshRNA^{Ctl} cells produced comparable viral titers at all time points. In contrast, CEMshRNA^{Slfn} cells facilitated significantly enhanced HIV-1 replication, yielding an exponentially increasing difference in viral titers (FIG. 17c). A second CEMshRNA^{Slfn} cell line established by means of a distinct huSlfn11 shRNA further corroborated these results (FIG. 24).

[0297] In summary, systematic analysis of the HIV replication cycle revealed that huSlfn11 does not inhibit reverse transcription, integration, or production and nuclear export of vRNA, nor did we observe a block in budding or release of viral particles. However, we discovered a selective inhibition in the synthesis of virally encoded proteins. Surprisingly, Coccia et al. had previously observed a specific inhibition of viral protein synthesis in HIV-infected cells in response to interferon, but did not identify the factors responsible for the effect²⁷. We postulate that huSlfn11 acts at the point of virus protein synthesis by exploiting the unique viral codon bias towards A/T nucleotides. This model supports the notion that the antiviral activity of huSlfn11 extends to other viruses with rare codon bias such as influenza, but not to AAV or HSV. The exact mechanism by which HIV alters tRNA function in its favour and how huSlfn11 counteracts this process will require considerable further analysis. Evidently, huSlfn11 interacts with all tRNAs in-vitro. Direct binding of huSlfn11 to tRNA offers the possibility that huSlfn11 either sequesters tRNAs, prevents their maturation via post-transcriptional processing or accelerates their deacylation. In either case, if already rare tRNAs are further reduced, tRNA availability might manifest as the rate limiting step in the synthesis of proteins involving those tRNAs. In contrast, a lesser or no impact would be expected on proteins synthesized via plentiful tRNAs, as even if a fraction of those tRNAs is ‘eliminated’, translation initiation will likely remain the rate limiting event. In conclusion, our results establish huSlfn11 as a potent, interferon-inducible restriction factor against retroviruses such as HIV, mediating its antiviral effects on the basis of codon usage discrimination.

### REFERENCES CITED IN EXAMPLES 1-4 AND FIGS. 1-13

[0298] 1. Dittmar K A, Mobley E M, Radek A J, Pan T. Exploring the regulation of tRNA distribution on the genomic scale. J Mol Biol. 2004; 337 (1):31-47.
[0299] 2. Lee M S, Kim Y J. Signaling pathways downstream of pattern-recognition receptors and their cross talk. Annu Rev Biochem. 2007; 76:447-80.
[0300] 3. Stark G R, Kerr I M, Williams B R, Silverman R H, Schreiber R D. How cells respond to interferons. Annu Rev Biochem. 1998; 67:227-64.
[0301] 4. Zhou A, Hassel B A, Silverman R H. Expression Cloning of 2-5A-Dependent RNAse: A Uniquely Regulated Mediator of Interferon Action. Cell. 1993; 72:753-5.
[0302] 5. Katze M G, Wambach M, Wong M-L, Garfinkle M, Meurs E, Chong K, et al. Functional Expression and RNA Binding Analysis of the Interferon-Induced, Double-Stranded RNA-Activated, 68,000-Mᵣ Protein Kinase in a Cell-Free System. Molecular Cellular Biology. 1991; 11 (11):5497-505.
[0303] 6. Marotta G, et al. Induction of LFA-1/CD11a and ICAM-1/CD54 adhesion molecules on neoplastic B cells during in vivo treatment of chronic lymphocytic leukemia with interferon-alpha 2. Blood. 1993; 81 (1):267-9. No abstract available.
[0304] 7. Loh J E, Chang C-H, Fodor W L, Flavell R A. Dissection of the interferon-g-MHC class II signal transduction pathway reveals that type 1 and type 11 interferon systems share common signalling components. EMBO. 1992; 11 (4):1351-63.
[0305] 8. Schwarz D A, Katayama C D, Hedrick S M. Schlafen, a new family of growth regulatory genes that affect thymocyte development. Immunity. 1998; 9 (5):657-68.
[0306] 9. Geserick P, Kaiser F, Klemm U, Kaufmann S H, Zerrahn J. Modulation of T cell development and activation by novel members of the Schlafen (slfn) gene family harbouring an RNA helicase-like motif. Int Immunol. 2004; 16 (10):1535-48.
[0307] 10. Brady G, Boggan L, Bowie A, O'Neill L A. Schlafen-1 causes a cell cycle arrest by inhibiting induction of cyclin D1. J Biol Chem. 2005; 280 (35):30723-34.
[0308] 11. Eskra L, Mathison A, Splitter G. Microarray analysis of mRNA levels from RAW264.7 macrophages infected with Brucella abortus. Infect Immun. 2003; 71 (3):1125-33.
[0309] 12. Huthoff H, Towers G J. Restriction of retroviral replication by APOBEC3G/F and TRIM5alpha. Trends Microbiol. 2008; 16 (12):612-9.
[0310] 13. Sakuma R, Mael A A, Ikeda Y. Alpha interferon enhances TRIM5alpha-mediated antiviral activities in human and rhesus monkey cells. J Virol. 2007; 81 (18):10201-6. PMCID: PMC2045407.
[0311] 14. Sayah D M, Sokolskaja E, Berthoux L, Luban J. Cyclophilin A retrotransposition into TRIM5 explains owl monkey resistance to HIV-1. Nature. 2004; 430 (6999):569-73.
[0312] 15. Stremlau M, Owens C M, Perron M J, Kiessling M, Autissier P, Sodroski J. The cytoplasmic body component TRIM5alpha restricts HIV-1 infection in Old World monkeys. Nature. 2004; 427 (6977):848-53.
[0313] 16. Barr S D, Smiley J R, Bushman F D. The interferon response inhibits HIV particle production by induction of TRIM22. PLoS Pathog. 2008; 4 (2):e1000007. PMCID: PMC2279259.
[0314] 17. Uchil P D, Quinlan B D, Chan W T, Luna J M, Mothes W. TRIM E3 ligases interfere with early and late stages of the retroviral life cycle. PLoS Pathog. 2008; 4 (2):e16. PMCID: PMC2222954.
[0315] 18. Carthagena L, Bergamaschi A, Luna J M, David A, Uchil P D, Margottin-Goguet F, et al. Human TRIM gene expression in response to interferons. PLoS One. 2009; 4 (3):e4894. PMCID: PMC2654144.
[0316] 19. Bonvin M, Achermann F, Greeve I, Stroka D, Keogh A, Inderbitzin D, et al. Interferon-inducible expression of APOBEC3 editing enzymes in human hepatocytes and inhibition of hepatitis B virus replication. Hepatology. 2006; 43 (6):1364-74.
[0317] 20. Chen K, Huang J, Zhang C, Huang S, Nunnari G, Wang F X, et al. Alpha interferon potently enhances the anti-human immunodeficiency virus type 1 activity of APOBEC3G in resting primary CD4 T cells. J Virol. 2006; 80 (15):7645-57. PMCID: PMC1563726.
[0318] 21. Goila-Gaur R, Strebel K. HIV-1 Vif, APOBEC, and intrinsic immunity. Retrovirology. 2008; 5:51. PMCID: PMC2443170.
[0319] 22. Peng G, Lei K J, Jin W, Greenwell-Wild T, Wahl S M. Induction of APOBEC3 family proteins, a defensive maneuver underlying interferon-induced anti-HIV-1 activity. J Exp Med. 2006; 203 (1):41-6. PMCID: PMC2118075.
[0320] 23. Sheehy A M, Gaddis N C, Choi J D, Malim M H. Isolation of a human gene that inhibits HIV-1 infection and is suppressed by the viral Vif protein. Nature. 2002; 418 (6898):646-50.
[0321] 24. Neil S J, Zang T, Bieniasz P D. Tetherin inhibits retrovirus release and is antagonized by HIV-1 Vpu. Nature. 2008; 451 (7177):425-30.
[0322] 25. Van Damme N, Goff D, Katsura C, Jorgenson R L, Mitchell R, Johnson M C, et al. The interferon-induced protein BST-2 restricts HIV-1 release and is downregulated from the cell surface by the viral Vpu protein. Cell Host Microbe. 2008; 3 (4):245-52. PMCID: PMC2474773.
[0323] 26. Okumura A, Lu G, Pitha-Rowe I, Pitha P M. Innate antiviral response targets HIV-1 release by the induction of ubiquitin-like protein ISG15. Proc Natl Acad Sci USA. 2006; 103 (5):1440-5. PMCID: PMC1360585.
[0324] 27. Espert L, Degols G, Lin Y L, Vincent T, Benkirane M, Mechti N. Interferon-induced exonuclease ISG20 exhibits an antiviral activity against human immunodeficiency virus type 1. J Gen Virol. 2005; 86 (Pt 8):2221-9.
[0325] 28. Haase A T. Perils at mucosal front lines for HIV and SIV and their hosts. Nat Rev Immunol. 2005; 5 (10):783-92.
[0326] 29. Zhao L, Neumann B, Murphy K, Silke J, Gonda T J. Lack of reproducible growth inhibition by Schlafen1 and Schlafen2 in vitro. Blood Cells Mol Dis. 2008; 41 (2):188-93.
[0327] 30. Coleman J R, Papamichail D, Skiena S, Futcher B, Wimmer E, Mueller S. Virus attenuation by genome-scale changes in codon pair bias. Science. 2008; 320 (5884):1784-7. PMCID: PMC2754401.
[0328] 31. Zhong J, Li Y, Zhao S, Liu S, Zhang Z. Mutation pressure shapes codon usage in the G C-Rich genome of foot-and-mouth disease virus. Virus Genes. 2007; 35 (3):767-76.
[0329] 32. Pinto R M, Aragones L, Costafreda M I, Ribes E, Bosch A. Codon usage and replicative strategies of hepatitis A virus. Virus Res. 2007; 127 (2):158-63.
[0330] 33. Zhou T, Gu W, Ma J, Sun X, Lu Z. Analysis of synonymous codon usage in H5N1 virus and other influenza A viruses. Biosystems. 2005; 81 (1):77-86.
[0331] 34. Meintjes P L, Rodrigo A G. Evolution of relative synonymous codon usage in Human Immunodeficiency Virus type-1. J Bioinform Comput Biol. 2005; 3 (1):157-68.
[0332] 35. Frelin L, Ahlen G, Alheim M, Weiland O, Barnfield C, Liljestrom P, et al. Codon optimization and mRNA amplification effectively enhances the immunogenicity of the hepatitis C virus nonstructural 3/4A gene. Gene Ther. 2004; 11 (6):522-33.
[0333] 36. Forsberg R, Christiansen F B. A codon-based model of host-specific selection in parasites, with an application to the influenza A virus. Mol Biol Evol. 2003; 20 (8):1252-9.
[0334] 37. Plotkin J B, Dushoff J. Codon bias and frequency-dependent selection on the hemagglutinin epitopes of influenza A virus. Proc Natl Acad Sci USA. 2003; 100 (12):7152-7. PMCID: PMC165845.
[0335] 38. Grantham P, Perrin P. AIDS virus and HTLV-I differ in codon choices. Nature. 1986; 319 (6056):727-8.
[0336] 39. Hruby D E, Guarino L A. Novel codon utilization within the vaccinia virus thymidine kinase gene. Virus Res. 1984; 1 (4):315-20.
[0337] 40. Wong E H, Smith D K, Rabadan R, Peiris M, Poon L L. Codon usage bias and the evolution of influenza A viruses. Codon Usage Biases of Influenza Virus. BMC Evol Biol. 10:253. PMCID: PMC2933640.
[0338] 41. van Weringh A, Ragonnet-Cronin M, Pranckeviciene E, Pavon-Eternod M, Kleiman L, Xia X. HIV-1 modulates the tRNA pool to improve translation efficiency. Mol Biol Evol.
[0339] 42. Kofman A, Graf M, Bojak A, Deml L, Bieler K, Kharazova A, et al. HIV-1 gag expression is quantitatively dependent on the ratio of native and optimized codons. Tsitologiia. 2003; 45 (1):86-93.
[0340] 43. Haas J, Park E C, Seed B. Codon usage limitation in the expression of HIV-1 envelope glycoprotein. Curr Biol. 1996; 6 (3):315-24.
[0341] 44. Berkhout B, van Hemert F J. The unusual nucleotide content of the HIV RNA genome results in a biased amino acid composition of HIV proteins. Nucleic Acids Res. 1994; 22 (9):1705-11. PMCID: PMC308053.
[0342] 45. Kypr J, Mrazek J. Unusual codon usage of HIV. Nature. 1987; 327 (6117):20.
[0343] 46. van Weringh A, Ragonnet-Cronin M, Pranckeviciene E, Pavon-Eternod M, Kleiman L, Xia X. HIV-1 modulates the tRNA pool to improve translation efficiency. Mol Biol Evol. 28 (6):1827-34. PMCID: PMC3098512.
[0344] 47. Erzberger J P, Berger J M. Evolutionary relationships and structural mechanisms of AAA+ proteins. Annu Rev Biophys Biomol Struct. 2006; 35:93-114.
[0345] 48. Alexandrov A, Chemyakov I, Gu W, Hiley S L, Hughes T R, Grayhack E J, et al. Rapid tRNA decay can result from lack of nonessential modifications. Mol Cell 2006; 21 (1):87-96.
[0346] 49. Carthagena L, Parise M C, Ringeard M, Chelbi-Alix M K, Hazan U, Nisole S. Implication of TRIM alpha and TRIMCyp in interferon-induced anti-retroviral restriction activities. Retrovirology. 2008; 5:59. PMCID: PMC2483995.
[0347] 50. Afonso C L, Tulman E R, Lu Z, Zsak L, Sandybaev N T, Kerembekova U Z, et al. The genome of camelpox virus. Virology. 2002; 295 (1):1-9.
[0348] 51. Bustos O, Naik S, Ayers G, Casola C, Perez-Lamigueiro M A, Chippindale P T, et al. Evolution of the Schlafen genes, a gene family associated with embryonic lethality, meiotic drive, immune processes and orthopoxvirus virulence. Gene. 2009; 447 (1):1-11.
[0349] 52. Bannert N, Kurth R. Retroelements and the human genome: new perspectives on an old relation. Proc Natl Acad Sci USA. 2004; 101 Suppl 2:14572-9. PMCID: PMC521986.

### REFERENCES CITED IN EXAMPLES 5-15 AND FIGS. 14-24

[0350] ¹ Sohn, W. J. et al. Novel transcriptional regulation of the schlafen-2 gene in macrophages in response to TLR-triggered stimulation. Mol Immunol 44, 3273-3282 (2007).
[0351] ² Yoneyama, M. et al. Shared and unique functions of the DExD/H-box helicases RIG-I, MDA5, and LGP2 in antiviral innate immunity. J Immunol 175, 2851-2858, doi:175/5/2851 (pii) (2005).
[0352] ³ Schwarz, D. A., Katayama, C. D. & Hedrick, S. M. Schlafen, a new family of growth regulatory genes that affect thymocyte development. Immunity 9, 657-668, doi:S1074-7613(00)80663-9 (pii) (1998).
[0353] ⁴ Geserick, P., Kaiser, F., Klemm, U., Kaufmann, S. H. & Zerrahn, J. Modulation of T cell development and activation by novel members of the Schlafen (slfn) gene family harbouring an RNA helicase-like motif. Int Immunol 16, 1535-1548 (2004).
[0354] ⁵ Berger, M. et al. An Slfn2 mutation causes lymphoid and myeloid immunodeficiency due to loss of immune cell quiescence. Nat Immunol 11, 335-343, doi:ni.1847 (pii) 10.1038/ni.1847 (2010).
[0355] ⁶ Fritz, C. C. & Green, M. R. HIV Rev uses a conserved cellular protein export pathway for the nucleocytoplasmic transport of viral RNAs. Curr Biol 6, 848-854, doi:S0960-9822 (02)00608-5 (pii) (1996).
[0356] ⁷ Fischer, U., Huber, J., Boelens, W. C., Mattaj, I. W. & Luehrmann, R. The HIV-1 Rev Activation Domain is a Nuclear Export Signal that Accesses an Export Pathway used by Specific Cellular RNAs. Cell 82, 475-483 (1995).
[0357] ⁸ Malim, M. H., Hauber, J., Le, S. Y., Maizel, J. V. & Cullen, B. R. The HIV-1 rev trans-activator acts through a structured target sequence to activate nuclear export of unspliced viral mRNA. Nature 338, 254-257, doi:10.1038/338254a0 (1989).
[0358] ⁹ Van Damme, N. et al. The interferon-induced protein BST-2 restricts HIV-1 release and is downregulated from the cell surface by the viral Vpu protein. Cell Host Microbe 3, 245-252, doi:S1931-3128(08)00086-3 (pii) 10.1016/j.chom.2008.03.001 (2008).
[0359] ¹⁰ Neil, S. J., Zang, T. & Bieniasz, P. D. Tetherin inhibits retrovirus release and is antagonized by HIV-1 Vpu. Nature 451, 425-430, doi:nature06553 (pii) 10.1038/nature06553 (2008).
[0360] ¹¹ Ganser-Pornillos, B. K., Yeager, M. & Sundquist, W. I. The structural biology of HIV assembly. Curr Opin Struct Biol 18, 203-217, doi:S0959-440X(08)00028-6 (pii) 10.1016/j.sbi.2008.02.001 (2008).
[0361] ¹² Coleman, J. R. et al. Virus attenuation by genome-scale changes in codon pair bias. Science 320, 1784-1787, doi:320/5884/1784 (pii) 10.1126/science.1155761 (2008).
[0362] ¹³ Zhou, T., Gu, W., Ma, J., Sun, X. & Lu, Z. Analysis of synonymous codon usage in H5N1 virus and other influenza A viruses. Biosystems 81, 77-86, doi:S0303-2647(05)00022-5 (pii) 10.1016/j.biosystems.2005.03.002 (2005).
[0363] ¹⁴ Meintjes, P. L. & Rodrigo, A. G. Evolution of relative synonymous codon usage in Human Immunodeficiency Virus type-1. J Bioinform Comput Biol 3, 157-168, doi:S0219720005000953 (pii) (2005).
[0364] ¹⁵ Frelin, L. et al. Codon optimization and mRNA amplification effectively enhances the immunogenicity of the hepatitis C virus nonstructural 3/4A gene. Gene Ther 11, 522-533, doi:10.1038/sj.gt.3302184 3302184 (pii) (2004).
[0365] ¹⁶ Forsberg, R. & Christiansen, F. B. A codon-based model of host-specific selection in parasites, with an application to the influenza A virus. Mol Biol Evol 20, 1252-1259, doi:10.1093/molbev/msg149 msg149 (pii) (2003).
[0366] ¹⁷ Plotkin, J. B. & Dushoff, J. Codon bias and frequency-dependent selection on the hemagglutinin epitopes of influenza A virus. Proc Natl Acad Sci USA 100, 7152-7157, doi:10.1073/pnas.1132114100 1132114100 (pii) (2003).
[0367] ¹⁸ Grantham, P. & Perrin, P. AIDS virus and HTLV-I differ in codon choices. Nature 319, 727-728, doi:10.1038/319727b0 (1986).
[0368] ¹⁹ Wong, E. H., Smith, D. K., Rabadan, R., Peiris, M. & Poon, L. L. Codon usage bias and the evolution of influenza A viruses. Codon Usage Biases of Influenza Virus. BMC Evol Biol 10, 253, doi:1471-2148-10-253 (pii) 10.1186/1471-2148-10-253.
[0369] ²⁰ van Weringh, A. et al. HIV-1 modulates the tRNA pool to improve translation efficiency. Mol Biol Evol, doi:msr005 (pii) 10.1093/molbev/msr005 (2011).
[0370] ²¹ Kofman, A. et al. HIV-1 gag expression is quantitatively dependent on the ratio of native and optimized codons. Tsitologiia 45, 86-93 (2003).
[0371] ²² Haas, J., Park, E. C. & Seed, B. Codon usage limitation in the expression of HIV-1 envelope glycoprotein. Curr Biol 6, 315-324, doi:S0960-9822(02)00482-7 (pii) (1996).
[0372] ²³ Berkhout, B. & van Hemert, F. J. The unusual nucleotide content of the HIV RNA genome results in a biased amino acid composition of HIV proteins. Nucleic Acids Res 22, 1705-1711 (1994).
[0373] ²⁴ Kypr, J. & Mrazek, J. Unusual codon usage of HIV. Nature 327, 20, doi:10.1038/327020a0 (1987).
[0374] ²⁵ Pavon-Eternod, M. et al. tRNA over-expression in breast cancer and functional consequences. Nucleic Acids Res 37, 7268-7280, doi:gkp787 (pii) 10.1093/nar/gkp787 (2009).
[0375] ²⁶ Dittmar, K. A., Mobley, E. M., Radek, A. J. & Pan, T. Exploring the regulation of tRNA distribution on the genomic scale. J Mol Biol 337, 31-47, doi:10.1016/j.jmb.2004.01.024 S0022283604000828 (pii) (2004).
[0376] ²⁷ Coccia, E. M., Krust, B. & Hovanessian, A. G. Specific inhibition of viral protein synthesis in HIV-infected cells in response to interferon treatment. J Biol Chem 269, 23087-23094 (1994).
[0377] ²⁸ Connor, R. I., Chen, B. K., Choe, S. & Landau, N. R. Vpr is required for efficient replication of human immunodeficiency virus type-1 in mononuclear phagocytes. Virology 206, 935-944, doi:S0042-6822(85)71016-1 (pii) 10.1006/viro.1995.1016 (1995).
   All publications and patents mentioned in the above specification are herein incorporated by reference. Various modifications and variations of the described compositions and methods of the invention will be apparent to those skilled in the art without departing from the scope and spirit of the invention. Although the invention has been described in connection with specific preferred embodiment, it should be understood that the invention as claimed should not be unduly limited to such specific embodiments. Indeed, various modifications of the described modes for carrying out the invention which are obvious to those skilled in the art and in fields related thereto are intended to be within the scope of the following claims.

We claim:

1. A method for screening one or more candidate compounds for activity in altering the level of expression of Schlafen (Slfn) in a mammalian target cell, comprising
a) contacting said one or more candidate compounds with a mammalian target cell that expresses Schlafen (Slfn) to produce a contacted cell, and
b) measuring the level of expression of one or more Slfn in said contacted cell and the uncontacted target cell.

2. The method of claim 1, wherein an altered level of expression of one or more Slfn in said contacted cell compared to in said uncontacted target cell identifies said one or more candidate compounds as having activity in altering the level of expression of Slfn in said uncontacted target cell.

3. A method for screening one or more one or more candidate compounds for activity in altering the level of virus infection of a mammalian host cell, comprising
a) providing
i) a virus,
ii) a mammalian host cell that is susceptible to said virus, and
iii) said one or more candidate compounds,
b) contacting said mammalian host cell with said virus and with said one or more candidate compounds under conditions for infection of said mammalian host cell with said virus, to produce a test contacted cell,
c) contacting said mammalian host cell with said virus, in the absence of said one or more candidate compounds, under conditions for infection of said transgenic mammalian cell with said virus, to produce a control contacted cell, and
d) measuring the level of virus infection of said test contacted cell and of said control contacted host cell.

4. The method of claim 3, wherein an altered level of infection of said contacted test cell compared to said control contacted cell identifies said one or more candidate compounds as having activity in altering the level of virus infection of said host cell.

5. The method of claim 3, further comprising detecting a reduction of from 20% to 100% in the level of said virus infection of said test contacted cell compared to said control contacted cell.

6. The method of claim 3, further comprising measuring the level of expression of one or more Slfn in one or more of said host cell, said test contacted cell, and said control contacted cell.

7. A method for screening one or more candidate compounds for altering the level of expression of one or more virus proteins, comprising
a) providing
i) a first cell that expresses a first heterologous nucleotide sequence encoding a heterologous polypeptide, wherein said first heterologous nucleotide sequence is optimized for gene expression based on codon bias of said virus,
ii) a second cell that expresses a second heterologous nucleotide sequence encoding said heterologous polypeptide, wherein said second heterologous nucleotide sequence is optimized for gene expression based on codon bias of a cell that is permissive to said virus, and
iii) said one or more candidate compounds,
b) contacting said one or more candidate compounds with said first cell to produce a first contacted cell,
c) contacting said one or more candidate compounds with said second cell to produce a second contacted cell, and
d) measuring the level of expression of said heterologous polypeptide in said first contacted cell and in said second contacted cell.

8. The method of claim 7, wherein measuring an altered level of expression of said heterologous polypeptide in said first contacted cell and measuring a substantially unaltered level of expression of said heterologous polypeptide in said second contacted cell identifies said one or more candidate compounds as specifically altering the level of expression of one or more proteins of said virus.

9. The method of claim 7, wherein said one or more candidate compounds comprise a test polypeptide sequence that is encoded by a nucleic acid sequence comprised in said first cell and in said second cell, and said contacting step comprises expressing said test polypeptide sequence by said first cell and by said second cell.

10. The method of claim 9, wherein said test polypeptide sequence comprises Schlafen (Slfn).

11. A method for identifying one or more Schlafen (Slfn) polymorphisms as altering the level of risk of a subject to infection by a virus, comprising
a) providing
i) a first sample comprising genomic Schlafen (Slfn) sequence from a first population of subjects infected by said virus, and
ii) a second sample comprising genomic Schlafen (Slfn) sequence from a second population of subjects not infected by said virus,
b) determining the presence of
i) wild type Schlafen (Slfn) gene sequence in said first sample and in said second sample, and
ii) one or more Schlafen (Slfn) polymorphisms in said first sample and in said second sample,
c) measuring the ratio of said one or more Schlafen (Slfn) polymorphisms relative to said wild type Schlafen (Slfn) gene sequence in
i) said first sample, and
ii) in said second sample,
wherein measuring a difference in said ratio in said first sample relative to said ratio in said second sample identifies said one or more Schlafen (Slfn) polymorphisms as altering the level of risk of said mammalian subject to infection by said virus.

12. A method for determining the risk of a mammalian subject to infection by a virus, comprising detecting, in a biological sample that comprises genomic Schlafen (Slfn) sequence from said subject, one or more Schlafen (Slfn) polymorphisms that is identified by the method of claim 11.

13. The method of claim 12, wherein said detecting comprises detecting an increased ratio of said one or more Schlafen (Slfn) polymorphisms in said subject.

14. A method for identifying one or more Schlafen (Slfn) as altering the level of risk of a subject to infection by a virus, comprising measuring the level of expression of one or more Schlafen (Slfn) in
i) a first sample from a first population of subjects infected by said virus, and
ii) a second sample from a second population of subjects not infected by said virus,
wherein measuring an altered level of expression in said first sample relative to said second sample, identifies said one or more Schlafen (Slfn) as altering the level of risk of said subject to infection by said virus.

15. A method for determining the risk of a mammalian subject to infection by a virus, comprising detecting in a biological sample from said subject an altered level of expression of one or more Schlafen (Slfn) identified by the method of claim 14.

16. A method for altering the level of expression of one or more virus protein by a target mammalian cell that is susceptible to a virus, comprising administering to said cell one or more compounds in an amount that alters the level of expression of one or more Schlafen (Slfn) in said cell.

17. The method of claim 16, further comprising measuring the level of expression of said one or more Schlafen (Slfn) in said cell.

18. The method of claim 16, wherein said one or more compounds that alter the level of expression of said Slfn in said target mammalian cell is identified by the method of claim 1.

19. The method of claim 16, wherein said cell is in vivo in a mammalian subject.

20. The method of claim 16, further comprising measuring the level of expression of said one or more virus proteins.

21. A transgenic non-human mammal comprising a homozygous deletion of at least a portion of one or more Schlafen (Slfn) gene, wherein said deletion is comprised in one or more of CD4+ T cell, macrophage cell, and dendritic cell of said mammal.

22. The transgenic mammal of claim 21, wherein said at least a portion encodes from amino acid 1 to 579 of a Slfn protein.

23. The transgenic mammal of claim 21, wherein said at least a portion encodes a polypeptide sequence that is at least 50-amino acids long and that is comprised by the sequence from amino acid 1 to 579 of a Slfn protein.

24. The transgenic mammal of claim 21, wherein said transgenic non-human mammal is susceptible to infection by human immunodeficiency virus (HIV).

25. The transgenic mammal of claim 21, wherein said transgenic non-human mammal exhibits one or more symptoms of Acquired Immune Deficiency Syndrome (AIDS).

26. A method for screening one or more one or more candidate compounds for activity in altering the level of infection of a mammalian host cell by human immunodeficiency virus (HIV), comprising
a) providing
i) human immunodeficiency virus (HIV),
ii) the transgenic non-human mammal of claim 21, and
iii) said one or more candidate compounds,
b) contacting said transgenic non-human mammal with said HIV and with said one or more candidate compounds under conditions for infection of cells of said mammal with said HIV to produce a contacted test mammal,
c) contacting said transgenic non-human mammal with said HIV, in the absence of said one or more candidate compounds, under conditions for infection of cells of said mammal with said HIV to produce a contacted control mammal, and
d) measuring the level of HIV infection of cells of said contacted test mammal and of cells of said contacted control mammal,
wherein measuring an altered level of HIV infection of said cells of said contacted test mammal compared to said cells of said contacted control mammal identifies said one or more candidate compounds as having activity in altering the level of said HIV infection of said host cell.

27. A transgenic non-human mammalian cell comprising a deletion of Schlafen (Slfn) gene.

28. A method for screening one or more one or more candidate compounds for activity in altering the level of infection of a mammalian cell by a virus, comprising
a) providing
i) virus,
ii) the transgenic mammalian cell of claim 27, and
iii) said one or more candidate compounds,
b) contacting said transgenic mammalian cell with said virus and with said one or more candidate compounds under conditions for infection of said transgenic mammalian cell with said virus to produce a contacted test cell,
c) contacting said transgenic mammalian cell with said virus, in the absence of said one or more candidate compounds, under conditions for infection of said transgenic mammalian cell with said virus to produce a contacted control cell, and
d) measuring the level of infection of said contacted test cell and of said contacted control cell with said virus,
wherein measuring an altered level of virus infection of said contacted test cell compared to said contacted control cell identifies said one or more candidate compounds as having activity in altering the level of infection of said mammalian cell by said virus.

29. The method of claim 28, wherein said one or more candidate compounds are identified by the method of claim 1.

The application's sequence listing, which the Patent Office published only in electronic form, follows.

SEQUENCE LISTING (221 sequences)

SEQ ID NO: 1 - protein, 891 aa, Homo sapiens [sequence omitted]

SEQ ID NO: 2 - protein, 338 aa, Homo sapiens
MSLRIDVDTNFPECVVDAGKVTLGTQQRQEMDPRLREKQNEIILRAVCALLNSGGGIIKAEIENKGYNYERHGVGLDVPPIFRSHLDKMQKENHFLIFVKSWNTEAGVPLATLCSNLYHRERTSTDVMDSQEALAFLKCRTQTPTNINVSNSLGPQAAQGSVQYEGNINVSAAALFDRKRLQYLEKLNLPESTHVEFVMFSTDVSHCVKDRLPKCVSAFANTEGGYVFFGVHDETCQVIGCEKEKIDLTSLRASIDGCIKKLPVHHFCTQRPEIKYVLNFLEVHDKGALRGYVCAIKVEKFCCAVFAKVPSSWQVKDNRVRQLPTREWTAWMMEADPG

SEQ ID NO: 3 - protein, 891 aa, Homo sapiens
MSLRIDVDTNFPECVVDAGKVTLGTQQRQEMDPRLREKQNEIILRAVCALLNSGGGIIKAEIENKGYNYERHGVGLDVPPIFRSHLDKMQKENHFLIFVKSWNTEAGVPLATLCSNLYHRERTSTDVMDSQEALAFLKCRTQTPTNINVSNSLGPQAAQGSVQYEGNINVSAAALFDRKRLQYLEKLNLPESTHVEFVMFSTDVSHCVKDRLPKCVSAFANTEGGYVFFGVHDETCQVIGCEKEKIDLTSLRASIDGCIKKLPVHHFCTQRPEIKYVLNFLEVHDKGALRGYVCAIKVEKFCCAVFAKVPSSWQVKDNRVRQLPTREWTAWMMEADPDLSRCPEMVLQLSLSSATPRSKPVCIHKNSECLKEQQKRYFPVFSDRVVYTPESLYKELFSQHKGLRDLINTEMRPFSQGILIFSQSWAVDLGLQEKQGVICDALLISQNNTPILYTIFSKWDAGCKGYSMIVAYSLKQKLVNKGGYTGRLCITPLVCVLNSDRKAQSVYSSYLQIYPESYNFMTPQHMEALLQSLVIVLLGFKSFLSEELGSEVLNLLTNKQYELLSKNLRKTRELFVHGLPGSGKTILALRIMEKIRNVFHCEPANILYICENQPLKKLVSFSKKNICQPVTRKTFMKNNFEHIQHIIIDDAQNFRTEDGDWYGKAKFITQTARDGPGVLWIFLDYFQTYHLSCSGLPPPSDQYPREEINRVVRNAGPIANYLQQVMQEARQNPPPNLPPGSLVMLYEPKWAQGVPGNLEIIEDLNLEEILIYVANKCRFLLRNGYSPKDIAVLFTKASEVEKYKDRLLTAMRKRKLSQLHEESDLLLQIGDASDVLTDHIVLDSVCRFSGLERNIVFGINPGVAPPAGAYNLLLCLASRAKRHLYILKASV

SEQ ID NO: 4 - protein, 891 aa, Homo sapiens; identical to SEQ ID NO: 3

SEQ ID NO: 5 - protein, 891 aa, Homo sapiens; identical to SEQ ID NO: 3

SEQ ID NO: 6 - protein, 549 aa, Homo sapiens
MNISIDLDTNYAELVLNVGRVTLGENNRKKMKDCQLRKQQNENVSRAVCALLNSGGGVIKAEVENKGYSYKKDGIGLDLENSFSNMLPFVPNFLDFMQNGNYFHIFVKSWSLETSGPQIATLSSSLYKRDVTSAKVMNASAALEFLKDMEKTGGRAYLRPEFPAKRACVDVQEESNMEALAADFFNRTELGYKEKLTFTESTHVEIKNFSTEKLLQRITEILPQYVSAFANTDGGYLFVGLNEDKEVIGFKAEKSYLTKLEEVTKNSIGKLPVHHFCVEKGTINYLCKFLGVYDKGRLCGYVYALRVERFCCAVFAKKPDSWHVKDNRVKQLTEKEWIQFMVDSEPVCEELPSPASTSSPVSQSYPLREYINFKIQPLRYHLPGLSEKITCAPKTFCRNLFSQHEGLKQLICEEMGSVNKGSLIFSRSWSLDLGLQENHKVLCDALLISQDKPPVLYTFHMVQDEEFKDYSTQTAQTLKQKLAKIGGYTKKVCVMTKIFYLSPEGKTSCQYDLNSQVIYPESYYWTTAQTMKDLEKALSNILPKENQIF

SEQ ID NO: 7 - protein, 338 aa, Artificial Sequence; identical to SEQ ID NO: 2
  Synthetic

SEQ ID NO: 8 - protein, 338 aa, Artificial Sequence; identical to SEQ ID NO: 2
  Synthetic

SEQ ID NO: 9 - protein, 901 aa, Homo sapiens
MEANQCPLVVEPSYPDLVINVGEVTLGEENRKKLQKIQRDQEKERVMRAACALLNSGGGVIRMAKKVEHPVEMGLDLEQSLRELIQSSDLQAFFETKQQGRCFYIFVKSWSSGPFPEDRSVKPRLCSLSSSLYRRSETSVRSMDSREAFCFLKTKRKPKILEEGPFHKIHKGVYQELPNSDPADPNSDPADLIFQKDYLEYGEILPFPESQLVEFKQFSTKHFQEYVKRTIPEYVPAFANTGGGYLFIGVDDKSREVLGCAKENVDPDSLRRKIEQAIYKLPCVHFCQPQRPITFTLKIVNVLKRGELYGYACMIRVNPFCCAVFSEAPNSWIVEDKYVCSLTTEKWVGMMTDTDPDLLQLSEDFECQLSLSSGPPLSRPVYSKKGLEHKKELQQLLFSVPPGYLRYTPESLWRDLISEHRGLEELINKQMQPFFRGILIFSRSWAVDLNLQEKPGVICDALLIAQNSTPILYTILREQDAEGQDYCTRTAFTLKQKLVNMGGYTGKVCVRAKVLCLSPESSAEALEAAVSPMDYPASYSLAGTQHMEALLQSLVIVLLGFRSLLSDQLGCEVLNLLTAQQYEIFSRSLRKNRELFVHGLPGSGKTIMAMKIMEKIRNVFHCEAHRILYVCENQPLRNFISDRNICRAETRKTFLRENFEHIQHIVIDEAQNFRTEDGDWYGKAKSITRRAKGGPGILWIFLDYFQTSHLDCSGLPPLSDQYPREELTRIVRNADPIAKYLQKEMQVIRSNPSFNIPTGCLEVFPEAEWSQGVQGTLRIKKYLTVEQIMTCVADTCRRFFDRGYSPKDVAVLVSTAKEVEHYKYELLKAMRKKRVVQLSDACDMLGDHIVLDSVRRFSGLERSIVFGIHPRTADPAILPNVLICLASRAKQHLYIFPWGGH

SEQ ID NO: 10 - protein, 901 aa, Homo sapiens; identical to SEQ ID NO: 9

SEQ ID NO: 11 - protein, 901 aa, Homo sapiens; identical to SEQ ID NO: 9

SEQ ID NO: 12 - protein, 901 aa, Homo sapiens; identical to SEQ ID NO: 9

SEQ ID NO: 13 - protein, 901 aa, Homo sapiens; identical to SEQ ID NO: 9

SEQ ID NO: 14 - protein, 901 aa, Homo sapiens; identical to SEQ ID NO: 9

SEQ ID NO: 15 - protein, 901 aa, Homo sapiens [sequence omitted]

SEQ ID NO: 16 - protein, 901 aa, Artificial Sequence
  Synthetic
MEANQCPLVVEPSYPDLVINVGEVTLGEENRKKLQKIQRDQEKERVMRAACALLNSGGGVIRMAKKVEHPVEMGLDLEQSLRELIQSSDLQAFFETKQQGRCFYIFVKSWSSGPFPEDRSFKPRLCSLSSSLYRRSETSVRSMDSREAFCFLKTKRKPKILEEGPFHKIHKGVYQELPNSDPADPNSDPADLIFQKDYLEYGEILPFPESQLVEFKQFSTKHFQEYVKRTIPEYVPAFANTGGGYLFIGVDDKSREVLGCAKENVDPDSLRRKIEQAIYKLPCVHFCQPQRPITFTLKIVDVLKRGELYGYACMIRVNPFCCAMFSEAPNSWIVEDKYVCSLTTEKWVGMMTDTDPDLLQLSEDFECQLSLSSGPPLSRPVYSKKGLEHKKELQQLLFSVPPGYLRYTPESLWRDLISEHRGLEELINKQMQPFFRGILIFSRSWAVDLNLQEKPGVICDALLIAQNSTPILYTILREQDAEGQDYCTRTAFTLKQKLVNMGGYTGKVCVRAKVLCLSPESSAEALEAAVSPMDYPASYSLAGTQHMEALLQSLVIVLLGFRSLLSDQLGCEVLNLLTAQQYEIFSRSLRKNRELFVHGLPGSGKTIMAMKIMEKIRNVFHCEAHRILYVCENQPLRNFISDRNICRAETRKTFLRENFEHIQHVVIDEAQNFRTEDGDWYGKAKSITRRAKGGPGILWIFLDYFQTSHLDCSGLPPLSDQYPREELTRIVRNADPIAKYLQKEMQVIRSNPSFNIPTGCLEVFPEAEWSQGVQGTLRIKKYLTVEQIMTCVADTCRRFFDRGYSPKDVAVLVSTAKEVEHYKYELLKAMRKKRVVQLSDACDMLGDHIVLDSVRRFSGLERSIVFGIHPRTADPAILPNVLICLASRAKQHLYIFPWGGH

SEQ ID NO: 17 - protein, 901 aa, Artificial Sequence; identical to SEQ ID NO: 16
  Synthetic

SEQ ID NO: 18 - protein, 578 aa, Homo sapiens
MNISVDLETNYAELVLDVGRVTLGENSRKKMKDCKLRKKQNESVSRAMCALLNSGGGVIKAEIENEDYSYTKDGIGLDLENSFSNILLFVPEYLDFMQNGNYFLIFVKSWSLNTSGLRITTLSSNLYKRDITSAKVMNATAALEFLKDMKKTRGRLYLRPELLAKRPCVDIQEENNMKALAGVFFDRTELDRKEKLTFTESTHVEIKNFSTEKLLQRIKEILPQYVSAFANTDGGYLFIGLNEDKEIIGFKAEMSDLDDLEREIEKSIRKMPVHHFCMEKKKINYSCKFLGVYDKGSLCGYVCALRVERFCCAVFAKEPDSWHVKDNRVMQLTRKEWIQFMVEAEPKFSSSYEEVISQINTSLPAPHSWPLLEWQRQRHHCPGLSGRITYTPENLCRKLFLQHEGLKQLICEEMDSVRKGSLIFSRSWSVDLGLQENHKVLCDALLISQDSPPVLYTFHMVQDEEFKGYSTQTALTLKQKLAKIGGYTKKVCVMTKIFYLSPEGMTSCQYDLRSQVIYPESYYFTRRKYLLKALFKALKRLKSLRDQFSFAENLYQIIGIDCFQKNDKKMFKSCRRLT

SEQ ID NO: 19 - protein, 578 aa, Homo sapiens
MNISVDLETNYAELVLDVGRVTLGENSRKKMKDCKLRKKQNERVSRAMCALLNSGGGVIKAEIENEDYSYTKDGIGLDLENSFSNILLFVPEYLDFMQNGNYFLIFVKSWSLNTSGLRITTLSSNLYKRDITSAKVMNATAALEFLKDMKKTRGRLYLRPELLAKRPRVDIQEENNMKALAGVFFDRTELDRKEKLTFTESTHVEIKNFSTEKLLQRIKEILPQYVSAFANTDGGYLFIGLNEDKEIIGFKAEMSDLDDLEREIEKSIRKMPVHHFCMEKKKINYSCKFLGVYDKGSLCGYVCALRVERFCCAVFAKEPDSWHVKDNRVMQLTRKEWIQFMVEAEPKFSSSYEEVISQINTSLPAPHSWPLLEWQRQRHHCPGLSGRITYTPENLCRKLFLQHEGLKQLICEEMDSVRKGSLIFSRSWSVDLGLQENHKVLCDALLISQDSPPVLYTFHMVQDEEFKGYSTQTALTLKQKLAKIGGYTKKVCVMTKIFYLSPEGMTSCQYDLRSQVIYPESYYFTRRKYLLKALFKALKRLKSLRDQFSFAENLYQIIGIDCFQKNDKKMFKSCRRLT

SEQ ID NO: 20 - protein, 578 aa, Homo sapiens; identical to SEQ ID NO: 18

SEQ ID NO: 21 - protein, 578 aa, Homo sapiens; identical to SEQ ID NO: 18

SEQ ID NO: 22 - protein, 578 aa, Homo sapiens; identical to SEQ ID NO: 19

SEQ ID NO: 23 - protein, 620 aa, Homo sapiens
MQLSEGLAAHGTRRAGKWKRTQVPLLGEECADMDLARFVLFFGNGLAAGKMNISIDLDTNYAELVLNVGRVTLGENNRKKMKDCQLRKQQNENVSRAVCALLNSGGGVIKAEVENKGYSYKKDGIGLDLENSFSNMLPFVPNFLDFMQNGNYFHIFVKSWSLETSGPQIATLSSSLYKRDVTSAKVMNASAALEFLKDMEKTGGRAYLRPEFPAKRACVDVQEESNMEALAADFFNRTELGYKEKLTFTESTHVEIKNFSTEKLLQRITEILPQYVSAFANTDGGYLFVGLNEDKEVIGFKAEKSYLTKLEEVTKNSIGKLPVHHFCVEKGTINYLCKFLGVYDKGRLCGYVYALRVERFCCAVFAKKPDSWHVKDNRVKQLTEKEWIQFMVDSEPVCEELPSPASTSSPVSQSYPLREYINFKIQPLRYHLPGLSEKITCAPKTFCRNLFSQHEGLKQLICEEMGSVNKGSLIFSRSWSLDLGLQENHKVLCDALLISQDKPPVLYTFHMVQDEEFKDYSTQTAQTLKQKLAKIGGYTKKVCVMTKIFYLSPEGKTSCQYDLNSQVIYPESYYWTTAQTMKDLEKALSNILPKENQIFLFVCLFRFCLFVCWFVCFFLR

SEQ ID NO: 24 - protein, 588 aa, Homo sapiens
MDLARKEFLRGNGLAAGKMNISIDLDTNYAELVLNVGRVTLGENNRKKMKDCQLRKQQNENVSRAVCALLNSGGGVIKAEVENKGYSYKKDGIGLDLENSFSNMLPFVPNFLDFMQNGNYFHIFVKSWSLETSGPQIATLSSSLYKRDVTSAKVMNASAALEFLKDMEKTGGRAYLRPEFPAKRACVDVQEESNMEALAADFFNRTELGYKEKLTFTESTHVEIKNFSTEKLLQRITEILPQYVSAFANTDGGYLFVGLNEDKEVIGFKAEKSYLTKLEEVTKNSIGKLPVHHFCVEKGTINYLCKFLGVYDKGRLCGYVYALRVERFCCAVFAKKPDSWHVKDNRVKQLTEKEWIQFMVDSEPVCEELPSPASTSSPVSQSYPLREYINFKIQPLRYHLPGLSEKITCAPKTFCRNLFSQHEGLKQLICEEMGSVNKGSLIFSRSWSLDLGLQENHKVLCDALLISQDKPPVLYTFHMVQDEEFKDYSTQTAQTLKQKLAKIGGYTKKVCVMTKIFYLSPEGKTSCQYDLNSQVIYPESYYWTTAQTMKDLEKALSNILPKENQIFLFVCLFRFCLFVCWFVCFFLR

SEQ ID NO: 25 - protein, 897 aa, Homo sapiens
MEANHCSLGVYPSYPDLVIDVGEVTLGEENRKKLQKTQRDQERARVIRAACALLNSGGGVIQMEMANRDERPTEMGLDLEESLRKLIQYPYLQAFFETKQHGRCFYIFVKSWSGDPFLKDGSFNSRICSLSSSLYCRSGTSVLHMNSRQAFDFLKTKERQSKYNLINEGSPPSKIMKAVYQNISESNPAYEVFQTDTIEYGEILSFPESPSIEFKQFSTKHIQQYVENIIPEYISAFANTEGGYLFIGVDDKSRKVLGCAKEQVDPDSLKNVIARAISKLPIVHFCSSKPRVEYSTKIVEVFCGKELYGYLCVIKVKAFCCVVFSEAPKSWMVREKYIRPLTTEEWVEKMMDADPEFPPDFAEAFESQLSLSDSPSLCRPVYSKKGLEHKADLQQHLFPVPPGHLECTPESLWKELSLQHEGLKELIHKQMRPFSQGIVILSRSWAVDLNLQEKPGVICDALLIAQNSTPILYTILREQDAEGQDYCTRTAFTLKQKLVNMGGYTGKVCVRAKVLCLSPESSAEALEAAVSPMDYPASYSLAGTQHMEALLQSLVIVLLGFRSLLSDQLGCEVLNLLTAQQYEIFSRSLRKNRELFVHGLPGSGKTIMAMKIMEKIRNVFHCEAHRILYVCENQPLRNFISDRNICRAETRETFLREKFEHIQHIVIDEAQNFRTEDGDWYRKAKTITQREKDCPGVLWIFLDYFQTSHLGHSGLPPLSAQYPREELTRVVRNADEIAEYIQQEMQLIIENPPINIPHGYLAILSEAKWVPGVPGNTKIIKNFTLEQIVTYVADTCRCFFERGYSPKDVAVLVSTVTEVEQYQSKLLKAMRKKMVVQLSDACDMLGVHIVLDSVRRFSGLERSIVFGIHPRTADPAILPNILICLASRAKQHLYIFL

SEQ ID NO: 26 - protein, 897 aa, Homo sapiens [sequence omitted]

SEQ ID NO: 27 - protein, 897 aa, Homo sapiens [sequence omitted]

SEQ ID NO: 28 - protein, 897 aa, Homo sapiens; identical to SEQ ID NO: 25

SEQ ID NO: 29 - protein, 897 aa, Artificial Sequence
  Synthetic
MEASHCSLGVYPSYPDLVIDVGEVTLGEENRKKLQKTQRDQERARVIRAACALLNSGGGVIQMEMANRDERPTEMGLDLEESLRKLIQYPYLQAFFETKQHGRCFYIFVKSWSGDPFLKDGSFNSRICSLSSSLYCRSGTSVLHMNSRQAFDFLKTKERQSKYNLINEGSPPSKIMKAVYQNISESNPAYEVFQTDTIEYGEILSFPESPSIEFKQFSTKHIQQYVENIIPEYISAFANTEGGYLFIGVDDKSRKVLGCAKEQVDPDSLKNVIARAISKLPIVHFCSSKPRVEYSTKIVEVFCGKELYGYLCVIKVKAFCCVVFSEAPKSWMVREKYIRPLTTEEWVEKMMDADPEFPPDFAEAFESQLSLSDSPSLCRPVYSKKGLEHKADLQQHLFPVPPGHLECTPESLWKELSLQHEGLKELIHKQMRPFSQGIVILSRSWAVDLNLQEKPGVICDALLIAQNSTPILYTILREQDAEGQDYCTRTAFTLKQKLVNMGGYTGKVCVRAKVLCLSPESSAEALEAAVSPMDYPASYSLAGTQHMEALLQSLVIVLLGFRSLLSDQLGCEVLNLLTAQQYEIFSRSLRKNRELFVHGLPGSGKTIMAMKIMEKIRNVFHCEAHRILYVCENQPLRNFISDRNICRAETRETFLREKFEHIQHIVIDEAQNFRTEDGDWYRKAKTITQREKDCPGVLWIFLDYFQTSHLGHSGLPPLSAQYPREELTRVVRNADEIAEYIQQEMQLIIENPPINIPHGYLAILSEAKWVPGVPGNTKIIKNFTLEQIVTYVADTCRCFFERGYSPKDVAVLVSTVTEVEQYQSKLLKAMRKKMVVQLSDACDMLGVHIVLDSVRRFSGLERSIVFGIHPRTADPAILPNILICLASRAKQHLYIFL

SEQ ID NO: 30 - protein, 852 aa, Homo sapiens
KAEIDDKTYSYQCHGLGQDLETSFQKLLPSGSQKYLDYMQQGHNLLIFVKSWSPDVFSLPLRICSLRSNLYRRDVTSAINLSASSALELLREKGFRAQRGRPRVKKLHPQQVLNRCIQEEEDMRILASEFFKKDKLMYKEKLNFTESTHVEFKRFTTKKVIPRIKEMLPHYVSAFANTQGGYVLIGVDDKSKEVVGCKWEKVNPDLLKKEIENCIEKLPTFHFCCEKPKVNFTTKILNVYQKDVLDGYVCVIQVEPFCCVVFAEAPDSWIMKDNSVTRLTAEQWVVMMLDTQSAPPSLVTDYNSCLISSASSARKSPGYPIKVHKFKEALQRHLFPVTQEEVQFKPESLCKKLFSDHKELEGLMKTLIHPCSQGIVIFSRSWAGDVGFRKEQNVLCDALLIAVNSPVVLYTILIDPNWPGGLEYARNTAHQLKQKLQTVGGYTGKVCIIPRLIHLSSTQSRPGEIPLRYPRSYRLADEEEMEDLLQALVVVSLSSRSLLSDQMGCEFFNLLIMEQSQLLSESLQKTRELFIYCFPGVRKTALAIKIMEKIKDLFHCKPKEILYVCESDSLKDFVTQQTTCQAVTRKTFMQGEFLKIKHIVMDETENFCSKYGNWYMKAKNITHPKAKGTGSENLHHGILWLFLDPFQIHHADVNGLPPPSAQFPRKTITSGIHCALEIAKVMKEEMKRIKENPPSNMSPDTLALFSETAYEEATCAQALPGVCETKTNLTTEQIANYVARKCHSLFQCGYLPKDIAILCRRGEDRGRYRLALLKAMELIETHRPSEVVFSPATGVWGSHIVLDSIQQFSGLERTVVFGLSPECDQSEEFHKLCFASRAIKHLYLLYEKRAAY

SEQ ID NO: 31 - protein, 912 aa, Homo sapiens
MESLKTDTEMPYPEVIVDVGRVIFGEENRKKMTNSCLKRSENSRIIRAICALLNSGGGVIKAEIDDKTYSYQCHGLGQDLETSFQKLLPSGSQKYLDYMQQGHNLLIFVKSWSPDVFSLPLRICSLRSNLYRRDVTSAINLSASSALELLREKGFRAQRGRPRVKKLHPQQVLNRCIQEEEDMRILASEFFKKDKLMYKEKLNFTESTHVEFKRFTTKKVIPRIKEMLPHYVSAFANTQGGYVLIGVDDKSKEVVGCKWEKVNPDLLKKEIENCIEKLPTFHFCCEKPKVNFTTKILNVYQKDVLDGYVCVIQVEPFCCVVFAEAPDSWIMKDNSVTRLTAEQWVVMMLDTQSAPPSLVTDYNSCLISSASSARKSPGYPIKVHKFKEALQRHLFPVTQEEVQFKPESLCKKLFSDHKELEGLMKTLIHPCSQGIVIFSRSWAGDVGFRKEQNVLCDALLIAVNSPVVLYTILIDPNWPGGLEYARNTAHQLKQKLQTVGGYTGKVCIIPRLIHLSSTQSRPGEIPLRYPRSYRLADEEEMEDLLQALVVVSLSSRSLLSDQMGCEFFNLLIMEQSQLLSESLQKTRELFIYCFPGVRKTALAIKIMEKIKDLFHCKPKEILYVCESDSLKDFVTQQTTCQAVTRKTFMQGEFLKIKHIVMDETENFCSKYGNWYMKAKNITHPKAKGTGSENLHHGILWLFLDPFQIHHADVNGLPPPSAQFPRKTITSGIHCALEIAKVMKEEMKRIKENPPSNMSPDTLALFSETAYEEATCAQALPGVCETKTNLTTEQIANYVARKCHSLFQCGYLPKDIAILCRRGEDRGRYRLALLKAMELIETHRPSEVVFSPATGVWGSHIVLDSIQQFSGLERTVVFGLSPECDQSEEFHKLCFASRAIKHLYLLYEKRAAY

SEQ ID NO: 32 - protein, 912 aa, Homo sapiens [sequence omitted]

SEQ ID NO: 33 - protein, 912 aa, Homo sapiens [sequence omitted]

SEQ ID NO: 34 - protein, 912 aa, Homo sapiens [sequence omitted]

SEQ ID NO: 35 - protein, 897 aa, Bos taurus
MEKHYSRLAVDSSYPDLVINVGKVTLGESNRKKLQKVQREKEKVKVIQAACALLNSGGGVIQLEMANNDDNLVEMGLDLEEALRTLILFSNLQAFFETKQQGSCYYIFVKSWSSDTLLENVFVKPRICSLSSSLYCRSGTSVYLMDSRKAFHFLKTKKTNAKSSGKEPVGEISKVIHPDLHDVDPTYCVFQKDHFERGEVMPFPESQLIEFKQFATKHIEQYMKDTILEYIPAFANTEGGYLVIGVDDKSREVLGCAKENVDRDSLKKKIEETIQKLSCVHFCQSRCQIDFTVKILDVLAEGELYGYACVIGVKRFCGAVFSGVPSSWMVNGKDVCSLTTKEWLSMMMDTDPDLTQLCKDFESQLSLSNSPPQSRPVYSKKGLEHKKDLQQLLFPVTPGCLKYTPESLQKELFSQNEGLEELINRQIDPSSQGILILSTSWAVDLNLEEKQGVICDALLIAQNRPPILYTILRGQDAEGQSYCTHTAFTLKQKLVNTGGYTENLCITTKVLHLNPEGGAQSSAGSGSVIDYPSSYHLADTQQMEVLLQSLVIVLLGFRSLLSDKLGCEVLNLLTAKQYKIFSKNLRKSKELFIHGLPGSGKTIMAIKIMEKIRNTFHCETQEILYICENKPLKNFIRGKNICQAVTRKSFMKYNFEYIQHIIIDEAQNFRTEDGEWYRKAKTITQRDVDCPRILWIFLDYFQTSHMECIGLPALSAQYPREELTRVVRNAGQIAGYLRRVLQKVRKNPPCNIPHEPLKMCLKAEWAQDVQGTLHIKKNLTLNAIVTHVADTCKLLFERGYSPKDVAVLVSTAKDVEKYQQKLLQAMRKKRIVYLTDASDLGGDHMVLDSVRRFSGLERSIVFGIHPSTMEPAILYNILVCLASRANQQLHILWQRDI

SEQ ID NO: 36 - protein, 869 aa, Bos taurus
MDSLKMETEMLYPEITVDVGRVTFGEENRKRMTNSYLKRTENSRIIQATCALLNSGGGVIKAEIEDKTYSYRCHGLGHDLETSFQKLFPSGSQKYLDYMQQGHNLMIFVKSWCPDIFSLRICSLRSNLYQRAVTSTINLSAHSALELLREKQSRTQRGRSTMQELHSQKALDRYMQEEEDMRMSASEFVKKDKLMYKEKLNFTESTHVEFKRFTTKKIIPRTKEMLPHYVSAFANTHGGYLIIGVDDKSKEVFGCQGEKVNPDLLKREIENCIEKLPTFHFCCEKPKVNFTTKILNVYQRDVLYGHVCVVHVEPFCCVVFTEAPDSWIIRDNSVTRLSAEQWVTMMLDIQSVSVTPEKIQFKPESLCKKLFSDHKGLEELMKTQIYPCSQGFVIVSRSWASDVGLRKEQYVLCDALLIAVNSSPVLYTILTDSTWTGGLVYAQNTARQLKQKLGTVGGYTGKVCVIPRLVHLPGAQRKPSEITLRYPQPYRLADEDEMEKLLQALITVSLCSRSLLSDQLGCEFSNLLVAEQCELLSQSLQETRELFVHCFPGTRKTALAIKIMEKIKDLFHCKSKEILYVCESDALKDFVTQQTTCRAVTRKTFMGGEFPKVKHIVMDETEHFCSKYGDWYMKAKSITHPKVRGAGSGNPHHGILWLFLDPFQVHHGGGNGLPPPSAQFPRKTITNGIHCALEIAMLMKEEMKRLKENPHPSVSPDTLAAFREASYEEAMRAQALPGVCEIETNLTTEEIARHVAERCHHLFQCGYLPRDIAILCRRAEDRGRYELALLRAMELFETCGATKVVFSQASGVLDGHIVLDSIQQFSGLERNIVFGLSPEYALSEEVHKLCFASKAIKHLYLLYEKKATF

SEQ ID NO: 37 - protein, 897 aa, Bos taurus; identical to SEQ ID NO: 35

SEQ ID NO: 38 - protein, 897 aa, Bos taurus; identical to SEQ ID NO: 35

SEQ ID NO: 39 - protein, 910 aa, Bos taurus
MDSLKMETEMLYPEITVDVGRVTFGEENRKRMTNSYLKRTENSRIIQATCALLNSGGGVIKAEIEDKTYSYRCHGLGHDLETSFQKLFPSGSQKYLDYMQQGHNLMIFVKSWCPDIFSLRICSLRSNLYQRAVTSTINLSAHSALELLREKQSRTQRGRSTMQELHSQKALDRYMQEEEDMRMSASEFVKKDKLMYKEKLNFTESTHVEFKRFTTKKIIPRTKEMLPHYVSAFANTHGGYLIIGVDDKSKEVFGCQGEKVNPDLLKREIENCIEKLPTFHFCCEKPKVNFTTKILNVYQRDVLYGHVCVVHVEPFCCVVFTEAPDSWIIRDNSVTRLSAEQWVTMMLDIQSVPSNLEADHSLHLISSASSPLRSLSYPIKVLEFKEALQQHLFPVTPEKIQFKPESLCKKLFSDHKGLEELMKTQIYPCSQGFVIVSRSWASDVGLRKEQYVLCDALLIAVNSSPVLYTILTDSTWTGGLVYAQNTARQLKQKLGTVGGYTGKVCVIPRLVHLPGAQRKPSEITLRYPQPYRLADEDEMEKLLQALITVSLCSRSLLSDQLGCEFSNLLVAEQCELLSQSLQETRELFVHCFPGTRKTALAIKIMEKIKDLFHCKSKEILYVCESDALKDFVTQQTTCRAVTRKTFMGGEFPKVKHIVMDETEHFCSKYGDWYMKAKSITHPKVRGAGSGNPHHGILWLFLDPFQVHHGGGNGLPPPSAQFPRKTITNGIHCALEIAMLMKEEMKRLKENPHPSVSPDTLAAFREASYEEAMRAQALPGVCEIETNLTTEEIARHVAERCHHLFQCGYLPRDIAILCRRAEDRGRYELALLRAMELFETCGATKVVFSQASGVLDGHIVLDSIQQFSGLERNIVFGLSPEYALSEEVHKLCFASKAIKHLYLLYEKKATF

SEQ ID NO: 40 - protein, 1381 aa, Equus caballus
MGLEEKPTQLVKEEEKFKPQIKKPSNFKRAEEDGRSAPRERSSWSQDWTECSRDPQVLLTPVGARARISSRAAGSLPPSPRRAVVSVPRTATAAQQRVPQARLVQSVRLGGPCGARPFGSAQNLLACRGSPKRRQSQQVSVRALSGDHQPCTNYGTRRRKEAESTFSSSGVAVGRTQRLLSLLLSPRHAPTSSLPWLLMGPFELESRGGRRCAERASRARRAWGGRGGLEDVGLRRDLPPRVRERTANLKKKLIRKHREATKKTSPRHKETPHPTRIRQRSAPVPRPGCAEGLGTAPRAPFPLGRLGLLTLSSNFQRQAGSGASESSEARNARRAGEEGEARSAQPNLTKSSLFSWSFHQDTICTALAVDPSLQPGALQTEAPPALPVVAFWVCANVFCVALFKSVCGKKNHKLEHRHTLYSPVQLASQTSAFAVLPELMSVWTNLAWHNFTKDDLGLQWLLGTFDFCKAIRLRGALEKRTFQGKTRTSAEKMSLKIDLETNFAECVLNAGKVVLGNKQRSEMYPQLREKQNEIILHAICALLNSGGGVVKAEIENKEYNYEIHGVGLHLPSIFNGYLDEMQQGDLFLIFVKSWNAEASGVRLATLCSNLYHRYRTSTDVMSSHEALAFLTEKTQTVMNINDSSLSPQNVGVGVQNEGNIKASAAALFARTHLQYLEKLNFTTSKHVEFKMFSTDVSRCFKESLPSCVSAFANTEGGFVFFGVHDETLQVIGSQKERMDLMALKASIDRCIKKLPVHHFCTRRHEIKYAVKFLEVHNQCALHGYVCAVKVEPFCCAVFAKIPSSWQVKNNCVRQLSTKEWVAWMTEADPDLSGFSEMVLALSLSSTTPCSRSVCIHKNLECLEEQQKRYFPVFPDRVSYIPDTLYKELISQHKGLRDLINREMRSVSRGVLIFSRSWAVDLGLQEKQGVICDALLLSQNNIPLLYTILGEWDACWKDYSMRLARSLKLKLVNTGGYTGKLCITPLVFLLNPDRTAKTLHGSDLQIYPESYNLTTIRHMETLLQSLVIVLLGFRSFLSEELGSEVLNLLTDKQYELLSKNLRKTRELFVHGLPGSGKTILALRIMEKVRNVFHCQPDDILYICENQPLRKFVSEKNVCQAVTRKTFMKNNFEKIQHIIIDEAQNFRTEDGDWYEKARTITQREKDCPGILWIFLDYFQTSHLSCNGLPPLLDQDPKEELTRVVRNADPIANYLQEVMQEVKEKPPPNIPAGCLEMVHEAQWAQGVPGNFENMECSDLEEMVVRVAEKCQFLLRSGYSPKDIAVLFSKASEVEKYKDKLLRAMRRRRTSQLDEESDLVVRIKDASDITGNHIVLDSVRRFSGLERNIVFGINPSAAESAVFYNLLLCLASRAKKHLYILKVSI

SEQ ID NO: 41 - protein, 890 aa, Equus caballus
MEKRNSSLVVESSYPDLVISVGEVTLGEGNRNKLQKTQREQEKAKVTQAACALLNSGGGVIRLEMANEDEHPVELGLDLEESLRELIQSLDLHAFFETKQQGRCYYIFVKSWSSDLFPEDRSVKPRICSLGTSLYRRSGTSVRLMDSREAFNFLKTKKRSPKILGKQPSSRVLKVLCQNPHNLDPAHRIFQKDQLEYGERLPFPESQFVEFKQFSTKHILQRVKDIIPEYVPAFANTEGGYLFIGVDDKSKKVLGCAKENVDRNSLREKIGKAIYELPCVHFCQSQCRINFEVRILDVLAGGELYGYACVIRVKPFCCAVFSEAPSSWMVKDKHVRSLTTEEWVDMMMDTDPDFESQLSLSSGPPLSRPVYTKKGLEHKEDLQQRLFPVPPGHLQYTPESLWKELSSEHEGLEELINEQMRPFSQGILIFSRSWAVDLNLQEQQGVICDALLIAQNSSPILYSVLREQDADGQFYCTRTAFTLKQKLVNMGGYTGKLCVMTKVFCLSPESHAEPLAGSGSPIDYPTSYDLEDTQQMEALLQSLVIVLLSFRSFLSDQLGCEVLNLLTAQQYEIFSKNLRKNRELFVHGLPGSGKTIMAMKIMEKIRNTFHCEANKILYVCENQPLRNFISNKRICQAVTRKTFMKNNFKEIQHIIIDEAQNFRTEDGDWYEKAKSITQREKGHPGILWIFLDYFQTSHLVDNGLPPFSVQYPREELTRVVRNADPIANYLQKVMQEIIKNPPFNIPPGSLEMLREAQWAQGVPGNFEIMERSTREQIVTYVAKTCKLLFEKGYSPKDIAVLVSTMDYVEPYKHKLLKAMRKKRVVQVSDACDMLDDHIVLDSVRRFSGLERNIVFGIYPRTAESAILYNILVCLSSRAKQQLYILWHDDC

SEQ ID NO: 42 - protein, 911 aa, Equus caballus
MESLKTDTEMLYPEITVEVGRVTFGEENRKKMTDSYLKRTENSKIIQATCALLNSGGGVIKAEIDDKTYNYRCHGLGQDLETSFQKLLPSGSQKYLDYMQQGRNLLIFVKSWSPDVFSLPLRICSLRSNLYQRAVTSAINLNASSALELLREKQSRAQRGRSRVKELHPQKVLDRNIQEEEDMRMFASEFFKKDKLMYKEKLNFTESTHVELKRFTTKKIVPRIKEMLPHYVSAFANTHGGYLIIGVDDKSKEVFGCKREKVNPDLLKKEIENCIEKLPTFHFCCEKPKVNFTTKILNVYQKDVLYGYVCVVQVEPFCCVVFTEAPDSWIMRDNAVTRLTAEHWVAMMLDIQSASSLATDHGLPLSSPASSALRSPSFPTKVLEFKGALQQRLFPVTQEEIQFKPESLCKKLFSDHKGLEELMKTQIYPCSQGIVIFSRSWASDVGLRKEWNVLCDALLIAVNSPLVLYTILIDPTWTGGLAYARSTAHQLKQKLGTVGGYTGKVCVIPRLIHLSSTQYRPGEIAMHYPQSYRLPSENEMEDLLQALIVVSLSSRSLLSDQLGCEFFDLLIAEQGELLSESLRETRELFIHCFPGTRKTALAIRVMEKMKDLFHCKPKEILYVCESDSLKDYVTQKTTCQAVTQKTFMQGEFLKIKHIVMDETENFCSQYGDWYTKARSITHPKVRGAGTENLHHGILWLFLDPFQVHHGAVNGLPPPSAQFPRKTITNGIHCALEIAMVMKEEMKKIKENPPSNMSPDTLALFREASYKEAMCAQALPGVCETETNMTTEQIAKHVAERCHNLFQCGYLPKDIAILCRRREDRGRYELALLKAMKLMETHGATEVVFSQAAGVLGSHIVLDSIQQFSGLKRNIVFGLSPECALSDEFHKLCFASRAIKHLYLLYEKRAAF

SEQ ID NO: 43 - protein, 626 aa, Sus scrofa
MRVLPGAFGSGSCRAAPRFTVKILNVLAKGELYGYACVIEVKPFCGAIFSEAPRSWMVKDKLICPLATQDWVNMMLDTDPDLSRLCEDFESQLSLSTGPPLSRPVYSKKDLEHKKDLQQRLFPVSPGRLKYTPESLWKELSSQNEGFEELINKETLPFSQGILIFSRSWAVDLSLEEKQGVICDALLVTQNSPPILYTILREQDAGEQSYSIRIAFTLKQKLVNLGGYTGYLCVMTKVLHLRPESNAESSEDSGSQIDYPRSYYLANIQQMEALLQSLVIVLLSFRSFLSDQLGCEVLHLLTAQQYQIFSNNLRNYRELFIHGLPGSGKTVLAMKIMEKISNEFHCEADEILYICENQPLRNFISSKKICHAVTRKTFMKTDFEKIQHIIIDEAQNFRTEDGDWYEKAKTITHRDKDCPGILWIFLDYFQTNHIESSGLPPLSAQYPRERLTRVVRNADQIAKYLKTVLQEVRKNPPPNIPQGSLQMVLEAEWAQRVRGTLKLKENLTFNQIVTYVADTCKLLFEKGYSPRNVAVLFSTVKVVECYKQELLRAMRKKIRVVQFTDANEVSGDRIVVDSVRRFSGLERNIVFGIHPKTVDSAILHTILVCLVSRANQQLHILRRRVV

SEQ ID NO: 44 - protein, 914 aa, Sus scrofa
MESLEMDPEMLYPEITVEVGRVTLGEENRKEMTNCSLKRTENSKIIQATCALLNSGGGVIKVEIDDKNYSYRCHGLGLDLETSLQKLLPSGSQKYLDYLQQGHNLMIFVKSWNPDVFSLPLRICSLRSNLYQRAMTSTVNLGASNALELLREKQSRAQRGRSRVKELHPQKALDQYTQEEEDTRLCASEFLQRDKLRYKEKLNFTESTHVEFKRFTTKKIIPRIKEMLPHYVSAFANAQGGYLIIGVDDKSKEVFGCNREKVDPDLLKKEIGNCIEKLPTFHFCCEKPKVNVTTKILNVYQNDALYGYVCVVHVEPFCCVVFTEAPDSWVIRDNCVTRLTAQQWVTMMLDIQPAPCNLSTDYSLHQISPASSTPRGTSCPIKVLEFKRALQQRLFPVTWEETQFQPESLCKKLFSDHKGLEELMKTQVNEDTNSPGIVVFSRSWASDVGLRKEHHVLCDALLIAVNRPLVLYTILTDPAWVGGRVYARNTAHQLKQKLGTLGGYTGKVCVLPRLICLPGTQCRPAEIPLRYPQSYRLANKDEMEDLLQALIVVSLCSPSLLSDQLGCEFFNLLIAEQCELLSESLQETRELFLHCFPGTRKTALAIKIMEKIKDLFHCKSKEILYICESDALKDFVTQQTTCQAVTRETFMRGEFPKIKHIVMDETENFCSTYGDWYLKAKSITHPKMRGAGSESLHRGILWLFLDPFLVRHAARSGLPPPSAQFPRKTITNGIHCALEIAMVMKEEMKRIQENPHSNVSPDTLASFREAAYEEAMCHQALPGVFESETNLTTEEMAKHVAERCHSLFQCGYLPKDIAILCRRGEDRRRYELALLRAMELFETHGATKVAFSQASGVLDAHIILDSIQQFSGLQRNIVFGLSPEGTLLEEVHKLRFASRAIKHLYLLYEKRAAF

SEQ ID NO: 45 - protein, 899 aa, Canis lupus familiaris
  misc_feature (41)..(41): Xaa can be any naturally occurring amino acid
  misc_feature (111)..(111): Xaa can be any naturally occurring amino acid
  misc_feature (211)..(211): Xaa can be any naturally occurring amino acid
  misc_feature (255)..(255): Xaa can be any naturally occurring amino acid
  misc_feature (291)..(291): Xaa can be any naturally occurring amino acid
  misc_feature (301)..(301): Xaa can be any naturally occurring amino acid
  misc_feature (315)..(315): Xaa can be any naturally occurring amino acid
  misc_feature (420)..(420): Xaa can be any naturally occurring amino acid
  misc_feature (438)..(438): Xaa can be any naturally occurring amino acid
  misc_feature (468)..(468): Xaa can be any naturally occurring amino acid
  misc_feature (496)..(496): Xaa can be any naturally occurring amino acid
  misc_feature (531)..(531): Xaa can be any naturally occurring amino acid
  misc_feature (550)..(550): Xaa can be any naturally occurring amino acid
  misc_feature (584)..(584): Xaa can be any naturally occurring amino acid
  misc_feature (591)..(591): Xaa can be any naturally occurring amino acid
  misc_feature (650)..(650): Xaa can be any naturally occurring amino acid
  misc_feature (670)..(670): Xaa can be any naturally occurring amino acid
  misc_feature (694)..(694): Xaa can be any naturally occurring amino acid
  misc_feature (722)..(722): Xaa can be any naturally occurring amino acid
MSIKVHLEMNFAECVLNAGKITLGNKQRNEMKPQLQKKQNXIILNAICALLNSGGGGVKAEIENKDYNYEIHGVGLNMPSIFKGYLDEMQRETSFLCVCVKSWNTEASGIXLAMLSSNLYHRYRASTDVMNSREALAFLKGRTQTLMNTNDSSSLSPQKDLVGIQNDGNIRASAAAFFARNHLQYLEKLNFAKSLHVELKMFSTEMSQCFXQVSPVVSAFADTEGGYIFFGVHNETSQVIECEKEKIDLIKLKVXIDCYIHKLPVHHFCTQRHEIKYAVKFLEVHNQGTLXGYVCAVKVKXFCCAVFGKVPSSWXVKDNHVKQLATMEWTAWMMEADPDLSRFPEMVLALSLSSTTPQSRTVCTHKNFEHLEEQQKHYFPVLSDRVVYTPLQGTVLKLSLYKELFSKLKGLRDLINKEYXPFPQGILIFFSRSWAVDXGLSEKQGVICDALLLSHNNIPVLYTILSEXDASWKGYSMIVAHTLKQKLVNTGGYTGXLHHSLATRAALNSDKTASTLHGSDLQIYPESYNLXTTQHMEALRSLVIVLLGFXSFLSEELGSEVLNLLTDKQYELLSKNICMTRELXVHGLPGXGKTILALRIMEKIRNVFQCQPDDILYICENQPLKKFVSFTKKNICQAVTWKTFMKNDFXKIQHIIIDEAQNFHTEDGNXYEKAKIIAKRENNHLGILWIFLDXFQTSHLSHNGFPALAAQYPREELTRVLXNADPIVNYLQEVMQEVKENPPPYIPLGSLEMVHKAKWAQDIPGNFEIMEYLGLSLEEMVVQVAEKCQFLFRNGYSPKDIAILSSKTSEVEKYKDKFLRAMRKRKISQLNEESDLLVQIKDASDIMANHIVLDSVHQFSSLERNIVFGFNTTVAEPAVFHNLLLCLAKKHLYILKVSI

SEQ ID NO: 46 - protein, 909 aa, Canis lupus familiaris
MAGLQTDVEMLYPETVVHVGRVTFGEENRKKMINSYLKRTENKKIIQATCALLNSGGGVIKAEIDDETYSYRCHGLGQDLETSFQKLLPSGSHKYLDYVQQGHNLLIFVKSWNPDVFSLPLRICSLHSNLYQRALTSTINLTARSALELLREKQSRAQRGRSRVRDLNSQTVPDRDIQEEKDMRNSASELFQKDRLMYKEKLNFTESTHVEFKRFTTKKIVPRVKEILSHYVSAFANTLGGYLILGVDDKSKEVFGCKREKVNPDLLKKEIENCVEKLPTFHFCCEKPKVHFTTKILNVYQKDVLYGYVCMVQVEPFCCVVFTEAPDSWIMRNDAVTRLTVEHWVAMMLDVHSTTSSLAADSLCAPAPSTLGSPSFPIKVLEFKGPLQQRLFPVTQEEIQFKPESLCKKLFLDHKGLEELMKTQIYPCSQGIVIFSRSWASDIGLRKEEDVLCDALLIAVNSPPVLYTILKNPSWNGGLEYARNTAHQLKQKLGTVGGYTGKVCVIPRLMYLPSIQCSPGEILVHYPQSYRLTTKDEVEDLLQALIVVSLCSRSLLSDQLGCEFFNLLIEEQCELLSESLQETRELFIHCFPGTRKTALAIKIMEKIKDLFQCKPKEILYVCETDSLKDYVTQQTTCQAVTRKIFLQGEFLKIKHIVMDDTENFCSKYGDWYLKARSITHPKVKGAGSENLHHGILWIFLDPFQIHCADINGLPTPSAQFPRKTITNGIHCALEIAMVMKEEMKRIKANPPSSLAPDTLSLFREDAYEEAVGAQALPGVFETETSLTMEQIVKRVAERCHNLFQCGYQPQDIAILCRKGEDRGRYECALLKAMELFETHGVTKVVFSQASGVSGSCIVLDSIQQFSGLERNIVFGLSPEWTLSEEAHKLCFASRAIKHLYLFYEKRAAF

SEQ ID NO: 47 - protein, 337 aa, Mus musculus
MNITDEGTPVLILNAGGITLGTESRKTMENHDRVEENRNITKALCALINSGEGKVKAHIKNPDYILSKHGIGEDLETSFKNILPSRPLDFKQYQSYFFICVEKSQSPDVSVGKPATIATNLYMRNGASSVEMNLDAAQKFLDNIKVAGGRSPSARPSDRPGDDTQEEGHIQELAAAFFKQSKLTKKENFLFSESKNVEYKSFETKKLLQRVKEILPRTVSAFANTDGGYLFIGLDEKKQEIVGFEAKNCQPKCLESEIEKCIQQLPVTHFCEEREKIKYKCKFIEVHDSGVVCKYVCALRVERFCCAVFAAEPESWHMKDGGVKRFTIEEWIKLLMS

SEQ ID NO: 48 - protein, 337 aa, Mus musculus; identical to SEQ ID NO: 47

SEQ ID NO: 49 - protein, 337 aa, Mus musculus; identical to SEQ ID NO: 47

SEQ ID NO: 50 - protein, 337 aa, Mus musculus; identical to SEQ ID NO: 47

SEQ ID NO: 51 - protein, 337 aa, Mus musculus; identical to SEQ ID NO: 47

SEQ ID NO: 52 - protein, 378 aa, Mus musculus
MGTRLEATEQSNHRTQRNDIQLENAKAAGKMGISVDLEAKYAKLGLNLGAITFGEKDRKKMKNSHLRKQENANISLAVCALLNSGGGAIKVKIENENYSLTRDGLGLDLEASLCKCLPFVQWHLDFTESEGYIYIYVKSWSQEIFGLPIGTLRTNLYVRSMSSSVQVSAAAALEFLQDLEETGGRPCVRPELPASIAFPEVEGEWHLEDLAAALFNRTEFQYEETFPFTRSRYVEVTLLSAKRLRKRIKELLPQTVSAFANTDGGFLFIGLDGKTQQIIGFEAEKSDLVLLESEIEKHIRQLPVTHFCEEKEKIKYTCKFIEVHKSGAVCAYVCALRVERFCCAVFAAEPESWHVEGGCVKRFTTEEWVKLQMNAPSG

SEQ ID NO: 53 - protein, 378 aa, Mus musculus; identical to SEQ ID NO: 52

SEQ ID NO: 54 - protein, 378 aa, Mus musculus; identical to SEQ ID NO: 52

SEQ ID NO: 55 - protein, 378 aa, Mus musculus; identical to SEQ ID NO: 52

SEQ ID NO: 56 - protein, 378 aa, Mus musculus; identical to SEQ ID NO: 52

SEQ ID NO: 57 - protein, 517 aa, Mus musculus
MKDIQLRRKEAKSILQAVCTLLNSGGGVVKAHIKNQNYSFTRDGMGLDLVNSLPGIMHLPHDYLDFMQHKDYFFVFVKPLKPNQKGPGITTLKTNLYRRINSISDEVKVANAVQLLKSRTDPEEKAESRPSSPGKIVCNETLNECLSLFNRDWLAYEETFCFTKSIHAEVKLTPKEKIFPKEKILELLPQTVSAFANTDGGFLFIGLDGKTQQIIGFEAEKSNLVLLESEIEKCIQQLPVTHFCGEKEKIKYTCKFIEVRKSGAVCAYVCALRVERFCCAVFAAEPESWHVEGGCVKRFTTEEWVKRQMDATAVMPGKVICCPEALYMKPFSQHEGYEHLVRTELGSLLKGTLVISKSWALDLGLQEKQEVIWDVLHISQGSLLTLYVFVQGDENLEGNSSLLGELGAELKGYYKQIALTLKQMLLNHCGYTAEIGIIVKITYLGHKTMCLYDTSTKIRYPQKYYLSAKAVKDLEKALVEILGSYESFYSLPRRNWDSFMSAFLNVGSYIVPVLRNV

SEQ ID NO: 58 - protein, 517 aa, Mus musculus; identical to SEQ ID NO: 57

SEQ ID NO: 59 - protein, 517 aa, Mus musculus; identical to SEQ ID NO: 57

SEQ ID NO: 60 - protein, 517 aa, Mus musculus; identical to SEQ ID NO: 57

SEQ ID NO: 61 - protein, 517 aa, Mus musculus; identical to SEQ ID NO: 57

SEQ ID NO: 62 - protein, 209 aa, Mus musculus
MPGKVICSPEALCMKPFSQHEGYEQLVRTELGSLRKGTLVVSKSWALDLGLQEKQEVIWDVLHISQGSLLTLHVFVQGDENLEGNSSLLGKLGAELKGYYKQIALTLKQTLVNLCGYTAKIGIIVKITYLGHKTMCLYDSSAKICYPQIYYLTTKAVKDLEKALAEILGSYESFYSLPRRNWDSFMSAFLNVGSYIVYFSRNVLTHIRI

SEQ ID NO: 63 - protein, 602 aa, Mus musculus
MAGNTPQLEKDVNPQTSIEPSVQVKCPGDILQGGRHAKRGRWMASWKGFHLGRRDSDCKMNITVDQDTDYAELVLSVGEITLGEKTRDSMKDSQLRRKEAKSILQAVCTLLNSGGGVVKAHIKNQNYSFTRDGMGLDLVNPLPGILHLPHDYLDFMQYNDYFFVFVKPWKPNQRGPGIATWKTNLYKRIFSFSVELKAADAVQFLKSRPSSHGKTVCNETLNECLSLFNRDWLAYEETFCFTKSTHAEVKLTPKEKISPKEKILELLPQTVSAFANTDGGYLFIGLDGKTQQIIGFEAEKSDLVLLESEIEKCIQQLPVTHFCEEKEKIKYTCKFIEVHKSGAVCAYVCAIRVEKFCCAVFAAEPESWHVEGSCVKRFTTEEWVKRQMDATAVMPGKVICSPEALCMKPFSQHEGYEQLVRTELGSLRKGTLVVSKSWALDLGLQEKQEVIWDVLHISQGSLLTLHVFVQGDENLEGNSSLLGKLGAELKGYYKQIALTLKQTLVNHCGYTAKIGIIVKITYLGHKTMCLYDSSAKICYPQIYYLTTKAVKDLEKALAEILGSYESFYSLPRRNWDSFMSAFLNVGSYIVYFSRNVLTHIRI

SEQ ID NO: 64 - protein, 602 aa, Mus musculus
MAGNTPQLEKDVNPQTSIEPSVQVKCPGDILQGGRHAKRGRWMASWKGFHLGRRDSDCKMNITVDQDTDYAELVLSVGEITLGEKTRDSMKDSQLRRKEAKSILQAVCTLLNSGGGVVKAHIKNQNYSFTRDGMGLDLVNPLPGILHLPHDYLDFMQYNDYFFVFVKPWKPNQRGPGIATWKTNLYKRIFSFSVELKAADAVQFLKSRPSSHGKTVCNETLNECLSLFNRDWLAYEETFCFTKSTHAEVKWTPKEKISPKEKILELLPQTVSAFANTDGGYLFIGLDGKTQQIIGFEAEKSDLVLLESEIEKCIQQLPVTHFCEEKEKIKYTCKFIEVHKSGAVCAYVCAIRVEKFCCAVFAAEPESWHVEGSCVKRFTTEEWVKRQMDATAVMPGKVICSPEALCMKPFSQHEGYEQLVRTELGSLRKGTLVVSKSWALDLGLQEKQEVIWDVLHISQGSLLTLHVFVQGDENLEGNSSLLGKLGAELKGYYKQIALTLKQTLVNHCGYTAKIGIIVKITYLGHKTMCLYDSSAKICYPQIYYLTTKAVKDLEKALAEILGSYESFYSLPRRNWDSFMSAFLNVGSYIVYFSRNVLTHIRI

SEQ ID NO: 65 - protein, 602 aa, Mus musculus; identical to SEQ ID NO: 63

SEQ ID NO: 66 - protein, 459 aa, Mus musculus
GILHLPHDYLDFMQYNDYFFVFVKPWKPNQRGPGIATWKTNLYKRIFSFSVELKAADAVQFLKSRPSSHGKTVCNETLNECLSLFNRDWLAYEETFCFTKSTHAEVKLTPKEKISPKEKILELLPQTVSAFANTDGGYLFIGLDGKTQQIIGFEAEKSDLVLLESEIEKCIQQLPVTHFCEEKEKIKYTCKFIEVHKSGAVCAYVCAIRVEKFCCAVFAAEPESWHVEGSCVKRFTTEEWVKRQMDATAVMPGKVICSPEALCMKPFSQHEGYEQLVRTELGSLRKGTLVVSKSWALDLGLQEKQEVIWDVLHISQGSLLTLHVFVQGDENLEGNSSLLGKLGAELKGYYKQIALTLKQTLVNHCGYTAKIGIIVKITYLGHKTMCLYDSSAKICYPQIYYLTTKAVKDLEKALAEILGSYESFYSLPRRNWDSFMSAFLNVGSYIVYFSRNVLTHIRI

SEQ ID NO: 67 - protein, 152 aa, Mus musculus
MVVLSGTLALPILQKGFHLGRRDSDCKMNITVDQDTDYAELVLSVGEITLGEKTRDSMKDSQLRRKEAKSILQAVCTLLNSGGGVVKAHIKNQNYSFTRDGMGLDLVNPLPGILHLPHDYLDFMQYNDYFFVFVKPWKPNQRGPGIATWKTN

SEQ ID NO: 68 - protein, 95 aa, Mus musculus
CGYTAKIGIIVKITYLGHKTMCLYDSSAKICYPQIYYLTTKAVKDLEKALAEILGSYESFYSLPRRNWDSFMSAFLNVGSYIVYFSRNVLTHIRI

SEQ ID NO: 69 - protein, 602 aa, Mus musculus; identical to SEQ ID NO: 63

SEQ ID NO: 70 - protein, 884 aa, Mus musculus
MSFLEDLELNFAECIQDGGKATLGVRQREEMDTTHCMKQNEIISQAVCALLNSGGGVVRVEIENGDYNFERDGVGLNLPPLFRNHLDEMLYGKLFLIYVSSWDVAASHVRLATLCSNLYHRCGTFTEVMDPEKALKFLKRVQDPRILGDSDSLNLQEAPVDDAQMILASDLFHSPQLQYLEKLNFTKSSHVEFQMFSADLSQGIRERLPKCVSALANSEGGYVFFGVHDETRHVIGCEKEKINCTNLKSTIDACIRKMPVYHFCGQNHKVQYELKFLEVYDKEALHGYVCAIKVERFCCAAFAKAPDSWEIKDNNKKPLTANDWASRMIEINPDLSSFPQMIPWKSMLNTTPCSKTVFTHKYLKCVEDLQKDYFPVSPNRITYTPESVYKDLFADYRGLRNLINMEMRCFSQGILIFSHSWAVDLGLQRRQDVICDALLISPNNVPILYTICNKWDLGNRHYSMKVARTLKQKLVNMGGYPGRLGIIPLVLPLGSHQRVRNDLEMPVYPESYNFITTQQVEALLQSLVIILFGFRPLLNEELNLESETVALLSDQQYGLLSTNLSKHREMFVHGLPGSGKTTLALMIVGKIRNVFNCQADNILYICENQSLKRFIVRKNVCQAVTRKTFMKNTFDNVQHIIVDEAQNFRTEDGNWYAKAKAITQRARDGPGVLYIFLDYFQINHLCCSGLPELQHQKPLLKLTRMLRSGDNITSYLQDIMHQIRENPPPNVPQEALMVGEELEWGPDVTGNLEITDNLNLEQMSVYVAEKCQSLWRSGYFTDVAVLFTRARDIEKCRDKLLLAMRRRSMSQLAEEPSLLVQVREGLDSLGSHVVLESVHRFSGMERSIVFGIIPMGSETAIFYNALLCLASRARTHLYIVKVVF

SEQ ID NO: 71 - protein, 947 aa, Mus musculus
TQGRGLHSGPRTSALIPGDGAPCGLRRTDSGGFLEVPARHHLTTCRSRAQPLARKRFQLKAEKMSFLEDLELNFAECIQDGGKATLGVRQREEMDTTHCMKQNEIISQAVCALLNSGGGVVRVEIENGDYNFERDGVGLNLPPLFRNHLDEMLYGKLFLIYVSSWDVAASHVRLATLCSNLYHRCGTFTEVMDPEKALKFLKRVQDPRILGDSDSLNLQEAPVDDAQMILASDLFHSPQLQYLEKLNFTKSSHVEFQMFSADLSQGIRERLPKCVSALANSEGGYVFFGVHDETRHVIGCEKEKINCTNLKSTIDACIRKMPVYHFCGQNHKVQYELKFLEVYDKEALHGYVCAIKVERFCCAAFAKAPDSWEIKDNNKKPLTANDWASRMIEINPDLSSFPQMIPWKSMLNTTPCSKTVFTHKYLKCVEDLQKDYFPVSPNRITYTPESVYKDLFADYRGLRNLINMEMRCFSQGILIFSHSWAVDLGLQRRQDVICDALLISPNNVPILYTICNKWDLGNRHYSMKVARTLKQKLVNMGGYPGRLGIIPLVLPLGSHQRVRNDLEMPVYPESYNFTTTKQVEALLQSLVIILFGFRPLLNEELNLESETVALLSDQQYGLLSTNLSKHREMFVHGLPGSGKTTLALMIVGKIRNVFNCQADDILYICENQSLKRFIVRKNVCQAVTRKTFMKNTFDNVQHIIVDEAQNFRTEDGNWYAKAKAITQRARDGPGVLYIFLDYFQINHLCCSGLPELQHQKPLLKLTRMLRSGDNITSYLQDIMHQIRENPPPNVPQEALMVGEELEWGPDVTGNLEITDNLNLEQMSVYVAEKCQSLWRSGYFTDVAVLFTRARDIEKCRDKLLLAMRRRSMSQLAEEPSLLVQVREGLDSLGSHVVLESVHRFSGMERSIVFGIIPMGSETAIFYNALLCLASRARTHLYIVKVVF

SEQ ID NO: 72 - protein, 469 aa, Mus musculus
MSFLEDLELNFAECIQDGGKATLGVRQREEMDTTHCMKQNEIISQAVCALLNSGGGVVRVEIENGDYNFERDGVGLNLPPLFRNHLDEMLYGKLFLIYVSSWDVAASHVRLATLCSNLYHRCGTFTEVMDPEKALKFLKRVQDPRILGDSDSLNLQEAPVDDAQMILASDLFHSPQLQYLEKLNFTKSSHVEFQMFSADLSQGIRERLPKCVSALANSEGGYVFFGVHDETRHVIGCEKEKINCTNLKSTIDACIRKMPVYHFCGQNHKVQYELKFLEVYDKEALHGYVCAIKVERFCCAAFAKAPDSWEIKDNNKKPLTANDWASRMIEINPDLSSFPQMIPWKSMLNTTPCSKTVFTHKYLKCVEDLQKDYFPVSPNRITYTPESVYKDLFADYRGLRNLINMEMRCFSQGILIFSHSWAVDLGLQRRQDVICDALLISPKLFWETQTNKNPEFISRDDLQEQIMKT

SEQ ID NO: 73 - protein, 884 aa, Homo sapiens; identical to SEQ ID NO: 70

SEQ ID NO: 74 - protein, 884 aa, Mus musculus; identical to SEQ ID NO: 70

SEQ ID NO: 75 - protein, 884 aa, Mus musculus
MSFLEDLELNFAECIQDGGKATLGVRQREEMDTTHCMKQNEIISQAVCALLNSGGGVVRVEIENGDYNFERDGVGLNLPPLFRNHLDEMLYGKLFLIYVSSWDVAASHVRLATLCSNLYHRCGTFTEVMDPEKALKFLKRVQDPRILGDSDSLNLQEAPVDDAQMILASDLFHSPQLQYLEKLNFTKSSHVEIQMFSADLSQGIRERLPKCVSALANSEGGYVFFGVHDETRHVIGCEKEKINCTNLKSTIDACIRKMPVYHFCGQNHKVQYELKFLEVYDKEALHGYVCAIKVERFCCAAFAKAPDSWEIKDNNKKPLTANDWASRMIEINPDLSSFPQMIPWKSMLNTTPCSKTVFTHKYLKCVEDLQKDYFPVSPNRITYTPESVYKDLFADYRGLRNLINMEMRCFSQGILIFSHSWAVDLGLQRRQDVICDALLISPNNVPILYTICNKWDLGNRHYSMKVARTLKQKLVNMGGYPGRLGIIPLVLPLGSHQRVRNDLEMPVYPESYNFITTQQVEALLQSLVIILFGFRPLLNEELNLESETVALLSDQQYGLLSTNLSKHREMFVHGLPGSGKTTLALMIVGKIRNVFNCQADNILYICENQSLKRFIVRKNVCQAVTRKTFMKNTFDNVQHIIVDEAQNFRTEDGNWYAKAKAITQRARDGPGVLYIFLDYFQINHLCCSGLPELQHQKPLLKLTRMLRSGDNITSYLQDIMHQIRENPPPNVPQEALMVGEELEWGPDVTGNLEITDNLNLEQMSVYVAEKCQSLWRSGYFTDVAVLFTRARDIEKCRDKLLLAMRRRSMSQLAEEPSLLVQVREGLDSLGSHVVLESVHRFSGMERSIVFGIIPMGSETAIFYNALLCLASRARTHLYIVKVVF

SEQ ID NO: 76 - protein, 884 aa, Mus musculus
MSFLEDLELNFAECIQDGGKATLGVRQREEMDTTHCMKQNEIISQAVCALLNSGGGVVRVEIENGDYNFERDGVGLNLPPLFRNHLDEMLYGKLFLIYVSSWDVAASHVRLATLCSNLYHRCGTFTEVMDPEKALKFLKRVQDPRILGDSDSLNLQEAPVDDAQMILASDLFHSPQLQYLEKLNFTKSSHVEFQMFSADLSQGIRERLPKCVSALANSEGGYVFFGVHDETRHVIGCEKEKINCTNLKSTIDACIRKMPVYHFCGQNHKVQYELKFLEVYDKEALHGYVCAIKVERFCCAAFAKAPDSWEIKDNNKKPLTANDWASRMIEINPDLSSFPQMIPWKSMLNTTPCSKTVFTHKYLKCVEDLQKDYFPVSPNRITYTPESVYKDLFADYRGLRNLINMEMRCFSQGILIFSHSWAVDLGLQRRQDVICDALLISPNNVPILYTICNKWDLGNRHYSMKVARTLKQKLVNMGGYPGRLGIIPLVLPLGSHQRVRNDLEMPVYPESYNFTTTKQVEALLQSLVIILFGFRPLLNEELNLESETVALLSDQQYGLLSTNLSKHREMFVHGLPGSGKTTLALMIVGKIRNVFNCQADDILYICENQSLKRFIVRKNVCQAVTRKTFMKNTFDNVQHIIVDEAQNFRTEDGNWYAKAKAITQRARDGPGVLYIFLDYFQINHLCCSGLPELQHQKPLLKLTRMLRSGDNITSYLQDIMHQIRENPPPNVPQEALMVGEELEWGPDVTGNLEITDNLNLEQMSVYVAEKCQSLWRSGYFTDVAVLFTRARDIEKCRDKLLLAMRRRSMSQLAEEPSLLVQVREGLDSLGSHVVLESVHRFSGMERSIVFGIIPMGSETAIFYNALLCLASRARTHLYIVKVVF

SEQ ID NO: 77 - protein, 884 aa, Mus musculus; identical to SEQ ID NO: 76

SEQ ID NO: 78 - protein, 256 aa, Mus musculus
MKGYFETNRIQHIIVDEAQNFHTEDGNWCEKAKGITQGGKACPRMFWIFLDYFQTSHLKESGLPDFELQYPKEELTQVVRNGDKIAEFLQQELGKIRDNPPCSIPRASLNIVHEFKWSQSISGTLKIKYLTSEKMVSYVANKCDVFLSKGYSPQDIAVLFSTDREKKAYEHMFLREMRKKRRASQMNDTSVCHSNMFDRIRRFSGLERSIVFGINPIATEQPISHNLLICLASRAMKYLYILYALTPEGQSSTVAC

SEQ ID NO: 79 - protein, 910 aa, Mus musculus
METHPSLAVKWSCPDLTIYAGEVTIGEEDRNKMDSKKRKLEKTRITEAACALLNSGGGLIAMQMTNKSEHPVEMGQDLEKSLRELIMSPNMQAFFETKQQEDQFYIFVKSWSCRPEDGSTKPRICSLGSSLYCRSITSKVAMDSREAFEFLKDKKACIKYRPTDDGAPPAKIPRAMCQNSLESNPAFEIFQSKKLEYGQCLLFSESTSIEFKQFSTKHVQAYMKNIIPEYISAFANTQGGYLFIGVDDKRIILGCPKDNVDRDSLKTVANETISKVPVFHFCSSKDKDKVSYETRVIDVFQEGNLYGYLCVIKVEPFCCAVFSEAPISWMVDKEKGVYRLNTEEWVRMMVDFGPEASSKDLSKDFECQLSLCNSPPHCRPVYSKKGLQHKVDLQQRLFQVSPDCLKYTPESLWKELCSQHKRLKGLVKQQIRSFSCGLLILYRSWAVDLNLKEKQEVICDALLIAQNSPPILYTILGEQDEQGQDYCNHTAFTLKQKLVNTGGYTGRVCVMTKVLCLSSQNNIETNGGSVSPINYPSSYNLANIQEMQDLLQALVIVLLNFRSFLSDQLGCEILNLLTAQQYEILSKSLRKTRELFVHGLPGSGKTIIAMKIMEKIRNTFHCETDSILYICENQPLRDFIRAKRICQAVTRKTFMNYRFKTNSFQHIIVDEAQNFRTEDGNWYGKAKAISRRVKSCPGMFWIFLDYFQTSHLKESGLPDFSRQYPREELTQVVRNGDKIAEFLQKELQKIRDNPPCSIPRQSLNIVHEFKWSQSVSGNIKTEQFTLEDMVIYVADKCYDFLRKGYSLQDIAVLFSTDKEKKTYESMFLGEMRKRRRASEMNHAYLCDSNMFDSIRRFSGLERSIVFGINPIATEQPISHNLLLCLASRAMKHLYILYFSTPEGHSSTEAC

SEQ ID NO: 80 - protein, 407 aa, Mus musculus
METHPSLAVKWSCPDLTIYAGEVTIGEEDRNKMDSKKRKLEKTRITEAACALLNSGGGLIAMQMTNKSEHPVEMGQDLEKSLRELIMSPNMQAFFETKQQEDQFYIFVKSWSCRPEDGSTKPRICSLGSSLYCRSITSKVAMDSREAFEFLKDKKACIKYRPTDDGAPPAKIPRAMCQNSLESNPAFEIFQSKKLEYGQCLLFSESTSIEFKQFSTKHVQAYMKNIIPEYISAFANTQGGYLFIGVDDKRIILGCPKDNVDRDSLKTVANETISKVPVFHFCSSKDKDKVSYETRVIDVFQEGNLYGYLCVIKVEPFCCAVFSEAPISWMVDKEKGVYRLNTEEWVRMMVDFGPEASSKDLSKDFECQLSLCNSPPHCRPVYSKKGLQHKVDLQQRLFQGQKESARQ

SEQ ID NO: 81 - protein, 910 aa, Mus musculus
METHPSLAVKWLCPDLTIYAGEVTIGEKDRNKMDSKKRKLEKTRITEAACALLNSGGGLIVMQMTNKSEHPMEMGQDLEKSLRELIMSPNMQAFFETKQQEDQFYIFIKSWSCSPEDGSTKPRICSLGSSLYCRSLTSKVAMNSREAFEFLKEKKAFIEYSPTDDRAPPAKIPRTMCQNSLESNPAFEIFQSKKLEYGQRLRFSESPSIEFKQFSTKHVQEYMKNIIPEYISAFANTQGGYLFIGVDDESIILGCPKDNVDRDSLKTVTNEAISKLPVFHFCSSKDKDKVSYETRVIDVFQGGNLYGYLCVIKVEPFCCAVFSEAPISWMVDKKKGVYRLNTEEWVHMMVDVGPEAASKDLSKDFECQLSLCNSPPHCRPVYSKKGLQHKVDLQQRLFQVSPDHLKYTPKFLWKELCSQHKRLKDLVKQQIRSFSCGLLILSRSWAVDLNLEEKQEVICDALLIAQNSPPILYTILGEQDEQGQDYCTRTAFTLKQKLVNTGGYTGRVCVMTKVLCLSSQNNNKTSGGSVSPIDYPSSYNLANIQEMQDLLQALVIVLLNFRSFLSDQLGCEILNLLTAQQYEILSKSLRKTRELFVHGLPGSGKTIIAMKIMEKIRNTFHCETDRILYICENQPLRDFIQAKNICQAVTRKTFMKGYFKTNSFQHIIVDEAQNFRTEDGNWYGKAKGITQRVKSCPGMFWIFLDYFQTSHLKESGLPDFARQYPKEELTQVVRNGDKIAEFLQKELQKIRDNPPCSIPRQSLNIVHEFKWSQSVSGNIKTKQFTLEEMVNYVAVKCDAFLRKGYSPQDIAVLFSTEKERKAKGHMFLREMRKKRRASQMNDTSVCHSNMFDSIRRFSGLERSIVFGINPIATEQPISHNLLLCLASRAIKHLYILYLLTPEGQSSTVAC

SEQ ID NO: 82 - protein, 910 aa, Mus musculus
METHPSLAVKWSCPDLTIYAGEVTIGEEDRNKMDSKKRKLEKTRITEAACALLNSGGGLIAMQMTNKSEHPVEMGQDLEKSLRELIMSPNMQAFFETKQQEDQFYIFVKSWSCRPEDGSTKPRICSLGSSLYCRSITSKVAMDSREAFEFLKDKKACIKYRPTDDGAPPAKIPRAMCQNSLESNPAFEIFQSKKLEYGQCLLFSESTSIEFKQFSTKHVQAYMKNIIPEYISAFANTQGGYLFIGVDDKRIILGCPKDNVDRDSLKTVANETISKVPVFHFCSSKDKDKVSYETRVIDVFQEGNLYGYLCVIKVEPFCCAVFSEAPISWMVDKEKGVYRLNTEEWVRMMVDFGPEASSKDLSKDFECQLSLCNSPPHCRPVYSKKGLQHKVDLQQRLFQVSPDCLKYTPESLWKELCSQHKRLKGLVKQQIRSFSCGLLILYRSWAVDLNLKEKQEVICDALLIAQNSPPILYTILGEQDEQGQDYCNHTAFTLKQKLVNTGGYTGRVCVMTKVLCLSSQNNIETNGGSVSPINYPSSYNLANIQEMQDLLQALVIVLLNFRSFLSDQLGCEILNLLTAQQYEILSKSLRKTRELFVHGLPGSGKTIIAMKIMEKIRNTFHCETDSILYICENQPLRDFIRAKRICQAVTRKTFMNYRFKTNSFQHIIVDEAQNFRTEDGNWYGKAKAISRRVKSCPGMFWIFLDYFQTSHLKESGLPDFSRQYPREELTQVVRNGDKIAEFLQKELQKIRDNPPCSIPRQSLNIVHEFKWSQSVSGNIKTEQFTLEDMVIYVADKCYDFLRKGYSLQDIAVLFSTDKEKKTYESMFLGEMRKRRRASEMNHAYLCDSNMFDSIRRFSGLERSIVFGINPIATEQPISHNLLLCLASRAMKHLYILYFPTPEGHSSTEAC

SEQ ID NO: 83 - protein, 910 aa, Mus musculus; identical to SEQ ID NO: 79

SEQ ID NO: 84 - protein, 417 aa, Mus musculus
SLESNPAFEIFQSKKLEYGQCLLFSESTSIEFKQFSTKHVQAYMKNIIPEYISAFANTQGGYLFIGVDDKRIILGCPKDNVDRDSLKTVANETISKVPVFHFCSSKDKDKVSYETRVIDVFQEGNLYGYLCVIKVEPFCCAVFSEAPISWMVDKEKGVYRLNTEEWVRMMVDFGPVSPDCLKYTPESLWKELCSQHKRLKGLVKQQIRSFSCGLLILYRSWAVDLNLKEKQEVICDALLIAQNSPPILYTILGEQDEQGQDYCNHTAFTLKQKLVNTGGYTGRVCVMTKVLCLSSQNNIETNGGSVSPINYPSSYNLANIQEMQDLLQALVIVLLNFRSFLSDQLGCEILNLLTAQQYEILSKSLRKTRELFVHGLPGSGKTIIAMKIMEKIRNTFHCETDSILYICENQPLRDFIR

SEQ ID NO: 85 - protein, 642 aa, Mus musculus
METHPSLAVKWSCPDLTIYAGEVTIGEEDRNKMDSKKRKLEKTRITEAACALLNSGGGLIAMQMTNKSEHPVEMGQDLEKSLRELIMSPNMQAFFETKQQEDQFYIFVKSWSCRPEDGSTKPRICSLGSSLYCRSITSKVAMDSREAFEFLKDKKACIKYRPTDDGAPPAKIPRAMCQNSLESNPAFEIFQSKKLEYGQCLLFSESTSIEFKQFSTKHVQAYMKNIIPEYISAFANTQGGYLFIGVDDKRIILGCPKDNVDRDSLKTVANETISKVPVFHFCSSKDKDKVSYETRVIDVFQEGNLYGYLCVIKVEPFCCAVFSEAPISWMVDKEKGVYRLNTEEWVRMMVDFGPEASSKDLSKDFECQLSLCNSPPHCRPVYSKKGLQHKVDLQQRLFQVSPDCLKYTPESLWKELCSQHKRLKGLVKQQIRSFSCGLLILYRSWAVDLNLKEKQEVICDALLIAQNSPPILYTILGEQDEQGQDYCNHTAFTLKQKLVNTGGYTGRVCVMTKVLCLSSQNNIETNGGSVSPINYPSSYNLANIQEMQDLLQALVIVLLNFRSFLSDQLGCEILNLLTAQQYEILSKSLRKTRELFVHGLPGSGKTIIAMKIMEKIRNTFHCETDSILYICENQPLRDFIRA

SEQ ID NO: 86 - protein, 910 aa, Mus musculus
METYLSLVVKRSYPDLIIYAGEVTLGEKVRNKKDSKKRKLEKTRITQAACALLNSGGGVIVIQMANQSEQPERMGQDLETSLRNLIPSLDLQAFFETKQQEDKFYIFVKSWSSSPEDDSTKPRICSLGTSLYCRSLTSKVAMDSRDAFYFLKKKKAYIKCSPTDDRAPPAKIPRTMSQKSLESNPAFEIFQSKKLEYGQRLLFSESTSIEFKQFDTENAQKYMKDIIPEYISAFANTQGGYLFIGVDDKSIILGCPKDNVDPDSLKIVANEAISKLPVFHFCSSKDKNKVSYETRVIDVFQEGNLYGYLCVIKVEPFCCAVFSEAPISWMVDKEKGVYTLNTEEWVRMMVDVGPEAASNDLSRDFECQLSLSDSPPHCRPVYSKKGLEHKVDLQQRLFQVSPDCLKYTPESLWSELCSQHERLEDLVKQQIRSFSCGLLILSRSWAVDLNLEEKQEVICDALLIAQNSPPILYTILGEQDEQGQDYCTRTAFTLKQKLVNTGGYTGRVCVMTKVLCLSSQNNNKTSGGSVSPIDYPSSYNLANIQEMQGLLQALVIVLLNFRSFLSDQLGCEVLNLLTAQQYEILSKSLRKTRELFVHGLPGSGKTIIAMKIMEKIRNTFHCETDRILYICENQPLRDFIQAKNICQAVTRKTFMNYKFKTERFQHIIIDEAQNFRTEDGNWYEKAKGITRGMKNCPGILWIFLDYFQTSHLQESGLPDFSLQYPKEELTQVVRNADKIAEFLQQELQKIRDNPPCSIPQESLNILHEFKWSQGVSGTYEITYLTLEKMVSYITDKCDVFLSKGYSPQDIAVLFSTDREKKAYEHMFLREMRKRRRASHMNDESVCHSNMFDSIRRFSGLERSIVFGINPIATEQPISHNLLLCLASRAMKHLYILYLSTPEGQSSMVAC

SEQ ID NO: 87 - protein, 910 aa, Mus musculus
METYLSLVVKRSYPDLIIYAGEVTLGEKVRNKKDSKKRKLEKTRITQAACALLNSGGGVIVIQMANQSEQPERMGQDLETSLRNLIPSLDLQAFFETKQQEDKFYIFVKSWSSSPEDDSTKPRICSLGTSLYCRSLTSKGAMDSRDAFYFLKKKKAYIKCSPTDDRASPAKIPRTMSQKSLESNPAFEIFQSKKFEYGQRLLFSEATSIEFKRFDTENAQKYMKDIIPEYISAFANTQGGYLFIGVDDKSIILGCPKDNVDPDSLKIVANEAISKLPVFHFCSSKDKNKVSYETRVIDVFQEGNLYGYLCVIKVEPFCCAVFSEAPISWMVDKEKGVYTLNTEEWVRMMVDVGPEAASNDLSRDFECQLSLSDSPPHCRPVYSKKGLEHKVDLQQHLFQVSPDCLKHTPESLWSELCSQHERLEDLVNQQIRSFSCGLLILSRSWAVDLNLEEKQEVICDALLIAQNSPPILYTILGEQDEQGQDYCTCTAFTLKQKLVNTGGYTGRVCVMTKVLCLSSQNNIETSGSSVSPIDYPSSYNLANIQEMQDLLQALVIVLLNFRSFLSDQLGCEIVNLLTAQQYEILSKSLRKTRELFVHGLPGSGKTIIAMKIMEKIRNTFHCETDRILYICENQPLRDFIQAKNICQAVTRKTFMNYKFKTERFQHIIIDEAQDFRTEDGNWYEKAKGITRGMKNCPGILWIFLDYFQTSHLQESGLPDFSLQYPKEELTQVVRNADKIAEFLQQELQKIRDNPPCSIPQESLNILHEFKWSQGVSGTYEITYLTLEKMVSYITDRCDVFLSKGYSPQDIAVLFSTDREKKAYEHMFLREMRKRRRASHMNDASVCHSNMFDSIRRFSGLERSIVFGINPIATEQPISHNLLLCLASRAMKHLYILYLSTPEGHSSMVAC

SEQ ID NO: 88 - protein, 910 aa, Mus musculus
METYLSLVVKRSYPDLIIYAGEVTLGEKVRNKKDSKKRKLEKTRITQAACALLNSGGGVIVIQMANQSEQPERMGQDLETSLRNLIPSLDLQAFFETKQQEDKFYIFVKSWSSSPEDDSTKPRICSLGTSLYCRSLTSKVAMDSRDAFYFLKKKKAYIKCSPTDDRAPPAKIPRTMSQKSLESNPAFEIFQSKKLEYGQRLLFSESTSIEFKQFDTENAQKYMKDIIPEYISAFANTQGGYLFIGVDDKSIILGCPKDNVDPDSLKIVANEAISKLPVFHFCSSKDKNKVSYETRVIDVFQEGNLYGYLCVIKVEPFCCAVFSEAPISWMVDKEKGVYTLNTEEWVRMMVDVGPEAASNDLSRDFECQLSLSDSPPHCRPVYSKKGLEHKVDLQQRLFQVSPDCLKYTPESLWSELCSQHERLEDLVKQQIRSFSCGLLILSRSWAVDLNLEEKQEVICDALLIAQNSPPILYTILGEQDEQGQDYCTRTAFTLKQKLVNTGGYTGRVCVMTKVLCLSSQNNNKTSGGSVSPIDYPSSYNLANIQEMQGLLQALVIVLLNFRSFLSDQLGCEVLNLLTAQQYEILSKSLRKTRELFVHGLPGSGKTIIAMKIMEKIRNTFHCETDRILYICENQPLRDFIQAKNICQAVTRKTFMNYKFKTERFQHIIIDEAQNFRTEDGNWYEKAKGITRGMKNCPGILWIFLDYFQTSHLQESGLPDFSLQYPKEELTQVVRNADKIAEFLQQELQKIRDNPPCSIPQESLNILHEFKWSQGVSGTYEITYLTLEKMVSYITDKCDVFLSKGYSPQDIAVLFSTDREKKAYEHMFLREMRKRRRASHMNDASVCHSNMFDSIRRFSGLERSIVFGINPIATEQPISHNLLLCLASRAMKHLYILYLSTPEGHSSMVAC

SEQ ID NO: 89 - protein, 910 aa, Artificial Sequence; identical to SEQ ID NO: 86
  Synthetic

SEQ ID NO: 90 - protein, 400 aa, Mus musculus
MTKVLCLSSQNNNKTSGGSVSPIDYPSSYNLANIQEMQGLLQALVIVLLNFRSFLSDQLGCEILNLLTAQQYEILSKSLRKTRELFVHGLPGSGKTIIAMKIMEKIRNTFHCETDRILYICENQPLRDFIQAKNICQAVTRETFMKDYFETNRIQHIIVDEAQNFCTEDGNWYEKAKGITRRMKCCPGILWIFLDYFQTSHLKKSGLPNFLCQFPKEKLTQMVRNADKIAEFLQQELQKIRDNPPFSIPQGSLSMFHGFYWAQGVSGTHEITYLTLEKMVSYVADKCDVFLSKGYSPQDIAVLFSTDREKKAYEHMFLREIRKRKRASQMNDASVCHSNMFDSIRRFSGLERSIVFGINPNATEQPISHNLLLCLASRAMKHLYILYVLTPEGYSSTVAC

SEQ ID NO: 91 - protein, 847 aa, Mus musculus
MQTTNKSEHPVEMGQDLEKSLRELIMSSNMQGFFETKQQEDQFYIFVKSWSCSPEDASTKPRICSLGSSLYCRSLTSNVAMDSREAFDFLKGKKRCVKCSPTDDRANKIPGAMYQNSLETNPAFEIFQSKKLEYGQHLLFSESTFIQFKQFSTKHVQEYIKNKIPEYISAFANTQGGYLFIGVDDKSTILGCPKDNVDRDSLKTVANEAISKLPVFHFCSSKDKDKVSYETRVIDVFQEGNLYGYLCVIKVEPFCCAVFSEAPISWMVDKEKGVYRLNTEEWVRMMVDVGPEAASKDLSKDFECQLSLSNSPPRCRPVYSKKGLEYKVDLQQHLFQVSPDHLKYTPESLWSELCFEHERLEDLVKQQIRSFSCGLLILSRSWAVDLNLEEKQEVICDALLIAENSPPILYTILGEQDEQGQDYCTSTAFTLKQKLVNTGGYTGRVCVMTKVLCLSSQNSIETNGGSVSPIDYPHSYNLANIQEMQDLLQALVIVLLNFRSFLSDQLGCEILNLLTAQQYEILSKSLRKTRELFVHGLPGSGKTIIAMKIMEKIRNTFHCETDRILYICENQPLRDFIQAKNICQAVTRETFMKDYFETNRIQHIIVDEAQNFCTEDGNWYEKAKGITRRMKCCPGILWIFLDYFQTSHLKKSGLPNFLCQFPTEKLTQMVRNADKIAEFLQQELRKIRANPPFSIPQGSLSMFHGFYWAQGVSGTHEITYLTLEKMVSYVADKCDVFLSKGYSPQDIAVLFSTDREKKAYEHMFLREIRKRKRASQMNDASVCHSNMFDSIRRFSGLEKSIVFGINPNATEQPISHNLLLCLASRATEHLYILYLSTPEGYSSTVAC

SEQ ID NO: 92 - protein, 908 aa, Mus musculus
METHPSLEVKGSCPDLIIYTGEVTLGEKVRSKMDSKKRKLEKKRITEAACALLNSGGGLIAMQTTNKSEHPVEMGQDLEKSLRELIMSSNMQGFFETKQQEDQFYIFVKSWSCSPEDASTKPRICSLGSSLYCRSLTSNVAMDSREAFDFLKGKKRCVKCSPTDDRANKIPGAMYQNSLETNPAFEIFQSKKLEYGQRLRFSESPSIEFKQFSTKHVQKYIKNIIPEYISAFANTQGGYLFIGVNDKSTILGCPKDNVDPNSLKTVANEAISKLPVFHFCSSKDKDKVSYETRVIDVFQEGNLYGYLCVIKVEPFCCAVFSEAPISWMVDKEKGVYRLNTEEWVRMMVDVGPEAASKDLSKDFECQLSLSNSPPRCRPVYSKKGLEHKVDLQQHLFQVSPDHLKYTPESLWSELCFEHERLEDLVNQQIRSFSCGLLILSRSWAVDLNLEEKQEVICDALLIAENSPPILYTILGEQDEQGQDYCTRTAFTLKQKLVNTGGYTGRVCVMTKVLCLSSQNSIETNGGSVSPIDYPHSYNLANIQEMQDLLQALVIILLNFRSFLSDQLGCEILNLLTAQQYEILSKSLRKTRELFVHGLPGSGKTIIAMKIMEKIRNTFHCETDRILYICENQPLRDFIQAKNICQAVTRETFMKDYFETNRIQHIIVDEAQNFCTEDGNWYEKAKGITRRMKCCPGILWIFLDYFQTSHLKKSGLPNFLCQFPKEKLTQMVRNADKIAEFLQQELQKIRDNPPFSIPQGSLSMFHGFYWAQGVSGTHEITYLTLEKMVSYVANKCDVFLSKGYSPQDIAVLFSTDREKKAYEHMFLREIRKRKRASQMNDASVCHSNMFDSIRRFSGLERSIVFGINPNATEQPISHNLLLCLASRAMKHLYILYVLTPEGHSSTVAC

SEQ ID NO: 93 - protein, 58 aa, Mus musculus
METHPSLEVKGSCPDLIIYAGEVTLGEKVRSKMDSKERKLEKKRITEAACALLNSGGG

SEQ ID NO: 94 - protein, 847 aa, Artificial Sequence; identical to SEQ ID NO: 91
  Synthetic

SEQ ID NO: 95 - protein, 378 aa, Mus musculus; identical to SEQ ID NO: 52

SEQ ID NO: 96 - protein, 899 aa, Mus musculus
MPYAEITVNLGKVTLGEENRKKMTNSCLKRHENSSLVQAVCALLNSGGGVIKAEINDKSYSYRCHGLGQDLETSFQKLLPSGSQKHLDYMQQNHDLLIFVKSWSPDASSLPLRICSLRSNLYQRDVTSAINLCANGALELLREKESRAQRGTPRLHSQDHILNRTIQEEEDIKMCALEFLKKDKLNFKEKLSFTESTHVEFKRFTTKKIVPRIKETLAHYVSAFANTQGGYIIIGVDDKSKEVFGCKKEKVNPDSLKTEIKNCIEKLPTYHFCREKPKVNFTTKILKVYQKEALYGFVCVVQVEPFCCVVFAEDPDSWIMENNIVTRLKVQQWVEMMLDIQSDPSSGFPTINDSAHLMTPALSAPRRPAYLTKVLEHKETLQRHFFSVTQENLQFQPESLCKKLFSDHEGLEDLLKAQTHPCSHGIVIFSRSWAGDIGLMREEKVLCDALLVAVGSPLVLYTILTDPSSTGRADYTQNTALQLKRQLQTLGGYPGKICVIPRVIYLASRGSRPDQPPVYYPRPYTLSSKAEVEDLLQGLVLVSLCSRSVLSDQLGCEFFKQCLEEQANTLSRNLQESRELFIHCLPGTRKTALAIKMVEKIKDVFHCKPKEILFVCENDSLRDFVMQQVTCRAVTRRTFMREEFPKIKHIVMDETENFCSRHGDWYVKAKSTTHPKANGAANEHPHHGILWLFLDPFQVRHADGSGLPVPSAQFPRKMITSEIHCAVEIAKVMKDEMKRMQENPPSMGLPDTLATFQEAPYEEAMRAGALPGVCEIKANLTPEQIANYVAEKCHSLFHEGYLPQDIAILYRRREDRGQYKDVLLKAMARGTTEVAFNSAADVCADGIILDSVEQFSGMVRNIVFGLCPESVHSEGVHKLCFASKAIKHLYLLYGGRTAF

SEQ ID NO: 97 - protein, 337 aa, Mus musculus; identical to SEQ ID NO: 47

SEQ ID NO: 98 - protein, 587 aa, Rattus norvegicus
MSITVDQDTDYAELVLSIGEITLGEKTRKSMKDSQRRKREAKTFQQAVCTLLNSGGGVAKARIKNQNYDFSRDGVGQDLENFLPHILDFPHEYLDFKQVKDYFLMFVKAWKLKQKGPGITTLKTNLYIRSISSSIELKAVNAVKFLKSRKCSKGRSDSRLSSPGTIVCNEVLNECLNLFNRDCFTCKEKFCFTKATHAEVKLTPKENILEILPQTVSSFANADGGYLFIGLDGKTQEIIGFEAEKSDLVHLESEIEKCIRQLPVTHFCEEREKIKYTCKFMEVHKPGAACSFVCALRVERFCCAVFAAEPESWHVEDSCVKRFTAEDWVKRQMDGPACFSKQDKGPLQSSRLPHSPRSCCPDNPDALQQSAGLPVISGKVISSPEALCGKLFSTQEAHEQLLWAQLDSLPKGTLVVTKRWALDLPLQDKHGVILDTLHIPQDSLLTLHGFVLGGEDLEDDSTLLRELGAELKGYYKQTAVTLKQTLANHGSYTEKIGIAIKITYLGHNKAVSLYDSSSKIHYPTKYYLTTETAKNLEKALAEILGSRESFYSLPRQNCSDHFIFAFFLSFSFLLVFLFWSWGLNPEP

SEQ ID NO: 99 - protein, 400 aa, Rattus norvegicus
MAGNLPRLVEDVNPQTFTEPSVQLKCPGNIFQGGRHAKPGSWKDSQHIKWKGFHLGSRDSNCKMSITVDQDTDYAELVLSIGEITLGEKTRKSMKDSQRRKREAKTFQQAVCTLLNSGGGVAKARIKNQNYDFSRDGVGQDLENFLPHILDFPHEYLDFKQVKDYFLMFVKAWKLKQKGPGITTLKTNLYIRSISSSIELKAVNAVKFLKSRKCSKGRSDSRLSSPGTIVCNEVLNECLNLFNRDCFTCKEKFCFTKATHAEVKLTPKENILEILPQTVSSFANADGGYLFIGLDGKTQEIIGFEAEKSDLVHLESEIEKCIRQLPVTHFCEEREKIKYTCKFMEVHKPGAACSFVCALRVERFCCAVFAAEPESWHVEDSCVKRFTAEDWVKRQMDGPA

SEQ ID NO: 100 - protein, 587 aa, Rattus norvegicus; identical to SEQ ID NO: 98

SEQ ID NO: 101 - protein, 884 aa, Rattus norvegicus
MNFLTNLELNFAECILDGGRATMGVRQRVEMDATQRMRQNETISQAVCALLNSGGGVIRVEIENRDYNFERDGVGLDLPPLFRNHLDQMMHGRFFLIYVSSWTVEASGVRLATLCSNLYRRCGNFTEVMDPPEALTFLRNVQVVRGLGDSDFLSLQEAPVDDAQMVLASDVFNSQQLQYLEKLNFTESLHVEFQMFSADLAQGIRERLPKCVSALANSEGGYVFFGVHETGQVIGCEKEKLNCSNLLTTIDACIRRMPVYHFCAHNHKVQYTHRFLEVYDKKALHGYVCAIKVERFCCVAFAKAPDSWEVKDSVMKPLTAKDWTSWMTETNPELFSFPQMISRMNMLNTTPRSRTVFSHKYLKCVEDLQKDYFSVLPNRITYTPESVYKDLFSDYRGLRNLISAEMRCFSQGILIFSHSWAVDLGLQRERDVICDALLISPNNVPILYTICNKWDLRNRQYSMGVAYTLKQRLVNMGGYTGRLGIIPLVFPLGADQRVRDDLEMPVYPESYNFITMEQVEALLQSLVIVLFGFRPLLNEELNSESETVALLTEQQHELLSMNLTKHRELFVHGLPGSGKTTLALMTLEKIKNVFNCQAEDILYICENQSLKKFVSRKIVCQAVTRKAFMKNTYDNVQHIIVDEAQNFRTEEGNWYAKAKGIVQRGRDGPGVLYIFLDYFQINHLGCSGLPELQNQKPMLKLTRMLRSGDRIANYLQDIMHLIQNNPPPNVPRDALRMGEEPEGRANDTGSLEITNGLNLEQMANYVAEKCQGLWRTGYYPEDVAVLFTNVRDIEKCRERLLLAMRRRTMSQLGEESSLLVQVREGLDSPGNHIVLDSVQRFSGMERSIVFGIIPENFETDISYNVLLCLASRARTHLYIVRVRL

SEQ ID NO: 102 - protein, 884 aa, Rattus norvegicus; identical to SEQ ID NO: 101

SEQ ID NO: 103 - protein, 240 aa, Rattus norvegicus
MCSFSCGLLILSRSWAVDLNLEGKQGVICDALLIAENSPPTLYTILEEQDELGQDYCTRTAFTLKQKLVNTGGYTGRVCVMTKVLCLSSQNNIETNGNSVSLIDYPRSYNLANIQEMEDLLQALVIVLLNFSSFLSDQLGCEILNLLTVQQYEILSKSLHKTRKLFVHGMPGSGKTIIAMKIMEKIKNTFHCERDSILYICENQLLRDFIRAKNVCRAVTRKTFMTPNFEVEKIQHIIVD

SEQ ID NO: 104 - protein, 907 aa, Rattus norvegicus
MEIHPSLVVEPSYPDLIIHAGEVTLGEKDRNKMDSKKKRLEKARITEAACALLNSGGGVIVMQMSNKSEHPVEMGLDLETSLRELIPSSDLQAFIETKQQGDLFYIFVKSWSCSPKDGSTKPRICSLSSSLYCRSLTSKLPLDSKETFEFLERKKTCVKGSLTDGKGPPAKIPRLMYQNDLESNPAFEIFQSERLEYGQRLPFSESASIEFKQFSTRRAHEYIKSVIPEYISAFANTQGGYLLFGVDDESKRVLGCPKDNVDRDSLKAVVNEAISKLPVFHFCSSKEKVSYKTRVIDVFKEGNLYGYLCVIKVERFCCAVFSEAPISWMADKENGVYSLNTEKWVRMMVDIGPEAASSKQSSLDDLSKDFECQLSLSNSPPHCRPVYSKKGLEHKGDLQKRLFQVSADCFKYTPESLWRELCSQHERLENLISQQMCSFSCGLLILSRSWAVDLNLEGKQGVICDALLIAENSPPTLYTILEEQDELGQDYCTRTAFTLKQKLVNTGGYTGRVCVMTKVLCLSSQNNIETNGNSVSLIDYPRSYNLANIQEMEDLLQALVIVLLNFSSFLSDQLGCEILNLLTVQQYEILSKSLHKTRKLFVHGMPGSGKTIIAMKIMEKIKNTFHCERDSILYICENQLLRDFIRAKNVCRAVTRKTFMTPNFEVEKIQHIIVDEAQNFRTENGDWYMKAKRITQRMKTCPQIFWIFLDYFQTSHQKESGLPDFLHQYPKEELTKVVRNADKIAEFLQKISEKIRSNPPPIIPRESLNMVCEFNWSQGVSGTCKLLTSLGLEQMARYVAERCYFFLKNGYSAQDIAVLFSTEDEKDNNEDMFLREIRNRTSQIDDAYHLYMFDSIRRFSGLERSIVFGIDPRTAEKSIFHNLMLCLASRARKHLYILSKVPNPFNF

SEQ ID NO: 105 - protein, 338 aa, Rattus norvegicus
MNITVETTKPALLLDAGEITLGIQSRKEMENHYRVKENRNILTALCALINFGEGKVKVQSKNPDYSLAKHGVGDDLETSFKNIWPSTPLVFKQDQLNVFICVQPQSPDGSGGKPATIAINLFMRNGASSVEMSFDVAQEFLEKMAGAGGRSPLARLKGKRPGDGLQEEVHVQELAAAFFKQSKLTKMEKFPFSESKNVEYKSFETKKLLQRVKEILPRTVSAFANTDGGYLFIGLDEKEQQIVGFEAKNCHPKCLESEIEKCIRQLPVTHFCEEREKIKYTCKFMEVHKPGAVCSYVCALRVERFCCAVFAAEPDSWHVEDNHLKRFTTEEWVNQMIA

SEQ ID NO: 106 - protein, 338 aa, Rattus norvegicus; identical to SEQ ID NO: 105

SEQ ID NO: 107 - protein, 381 aa, Rattus norvegicus
MGAGLHAAEQDNHRAHRKGTGQQNAKAAGKMGISVDLEAEYAKLGLNLGAITLGEKDRRKMKNSHLRKKENENISLAVCALLNSGGGAIKVKIENENYSLTRDGLGLDLETSLCKCLPFVQWYLDFTESKGYIYIYVRAWSQEIFGLPIGTLSTNLYVRVVSSSVQVSADAALQFLQDLEEAGGRPRVRPELPARKACPGVEGECHQEDLAAAFFNKTEFQYEETFFFTRSRYVEVTSLSVKRLRKRIREILPRTVSAFANTDGGYLFIGLDGKKQQIIGFEAEKSDLVHLESEIEKCIRQLPVTHFCEEREKIKYTCKFMEVHKPGAACSYVCALRVERFCCAVFAAEPESWHVEDSCVKRFAAEDWVRLQMGSREAWKR

SEQ ID NO: 108 - protein, 768 aa, Rattus norvegicus
MRAGNTPELVEDVNPQPVTEPSVQLMGPGNILQGGRRAKPGSLKDSQRGFHLGNRDSDWKMSITVDQDTDYVELVLSIGEITLGEKNRNSMKDSQRRRKETKNFLQAVCTLLNSGGGVVKARIKNQDYSFTRDGIGQDLVNSLPGILKLPHEYLDYMQDQDYFFIFVKAWKLNQKGPGITTLKTNLYSRSISSSIELKAADTVKFLKSRKCSKGRSDSRLSSPGTIDCNEVLNECLNLFNRDCFAYKETFCFTKATHAEVKLTPKKKILEILPQTVSSFANADGGYLFTGLDGKTQEIIGFEAEKSDLVHLESEIEKCIRQLPVTHFCEEREKIKYTCKFMEVHKPGAACSYVCALRVERFCCAVFAAEPESWHVEDSCVKRFTAEDWVKRQMDGPAFISGKVISSPEALCGKLFSPQEAHEQLLLAQLGSLCEETLVITKRWALDLPLQDKQGVILDVLQISQDSLLTLHGFVLGGEDLEDDSTFLRELGAELKGYYKQTALTLKQTLINLSGCTGKVGITTKITYLCHNKAVSLYDSSSKIHYPTKYYLTAKTVTDLEKALRIISGKVISSPEALCGKLFSPQEAHEQLLWAQLDSPPNGTLVITKRWALDLPLQDKQGVILDVLQISQDSLLTLHGFVLGGEDLEDDSTLLRELGAKLKGYYKQTALTLKQTLINLSGCTGKVGITTKITYLCHNKAVSLYDSSSKIHYPRKHYLTTQTVRDLEKALLKYYAVCVPTQFTSETFHKYQWIVNFVKNVINRALHEK

SEQ ID NO: 109 - protein, 768 aa, Rattus norvegicus; identical to SEQ ID NO: 108

SEQ ID NO: 110 - protein, 907 aa, Rattus norvegicus; identical to SEQ ID NO: 104

SEQ ID NO: 111 - protein, 894 aa, Rattus norvegicus
MPYAEITVNLGKVTLGEENRKEMTNSCLKRHENSSIVQAVCALLNSGGGVIKAKIDDKGYSYRCHGLGQDLETSFQKLLPSGSQKHLDYMQQDHDFLIFVKSWSPDASSLPLKICSLRSNIYQRDVTSAINLCASSALELLREKESRAQRGIPKLHSQDHILNRTIQEEEDIKMCALEFFKKDKLNYKEKLSFTESTHVEFKRFTTKKIVPRIKETLAHYVSAFANTQGGYIIIGVDDKSKEVFGCMKEKVNPDSLKTEIKNCIEKLPTYHFCREKPRVNFTTKILKVYQREALYGFVCVVQVEPFCCVVFAEDPDSWIMENNIVTRLKAQQWVEMMLAIQSDPSGFPTTADSAHPMSPALSAPGRPAYLTKVLEHKETLQRRFFPVTQENLQFHPECLCKKLFSDHEGLEDLLKTQTHPCSHGIVIFSRSWAGDIGLTREEKVLCDALLVAVGSPLVLYTVLTDPSWLGGSDYTQNTALQLKRRLQTLGGYRGKVCVIPRVICLPGRGSRPDPSPVYPRAYKLSSSAEVEDLLQSLVLVSLCSRSVLSDQLGCEFFKLCIEEEARALSRNLRETRELFIHCLPGTRKTALAIKMVEKIKDMFHCKPKEILYVCENDSLRDFVMQQVTCRAVTRRAFMREEFPKVKHIVLDETENFCSRHGDWYEKAKSTTHPKASGERLHHGILWLFLDPFQTRHPGASGLPAPSAQFPRKMITSEIHCAVEIAKVMKDEMKRIQENPPSNGSPDTLAMFQEVPYEEAMCAQALPGVCEIKANLTPGQIASYVAEKCHSLFHEGYRPQDIAILYRRWEDRGQYKEALLRAMARGTMEVSFNSAADICADGVIFDSVEQFSGMVRNIVFGLSTESVHSEGVHKLCFASRAVKHLYLLYGGRTAF

SEQ ID NO: 112 - protein, 894 aa, Rattus norvegicus; identical to SEQ ID NO: 111

SEQ ID NO: 113 - protein, 884 aa, Cricetulus griseus
MSILANLELNFAECILDGGKATLGVRQRAGMDPAHRMRQDEAISQAVCALLNSGGGVVRVEIENEDYNYESDGVGLDLPPLFRNHIDEMLQGKLFLIFVNSWEVAPSGVQLATLCSNLYHRRGTFTEVMDSLEALLFLRRRIQALENVDDPSSLNPQEAPVDNQMILAADLFGKQQQLLYLEKLNFTESPHVEFQMFSVDLTQGIKEKLPKCVSALANSEGGYVFFGVHDETCQVIGCEKEKVNHSSLLNVIDRCIRSMPVHHFCSQVHKVQHDCKFLEVYDKGAVRGYVCVIKVEQFCCAAFSRAPDSWEMKDNQMKQLATKDWAAWMIKTDTELSRFPQMIISRSVTDTTPRCRTVCIHKNLKCVEELQKDFFPVSPDRITYTPESVYRDLFSDHRGLRNLISMEMRSFSQGVLIFSHSWAVDLGLQRRRGVICDALLISPNNVPILYTICNKWDLGYRWYAMTVARTLKQRLANMGGYPGRLGIIPLVLQLGPHHTVRAGLEIPIYPESYNFTTMQQMEVLLQSLVIVLFGFRSFLNEELNSEAVTLFTDQQYQLLLKDLCKNRELFVHGSPGSGKTTLALKIMEKIRNVFSCQAEDILYICENHALKRFVSQRNICQAVSRKYFMKNTFFTIKHIVVDDAQNFRTEDGNWYAKANSIIQRGRDGPGVLCVFLDYFQTNHLCCSGLPDLQHQRFILKLTRMLRSGDNIANYLQEIMQQIRRNPPPNVPSEALTMVQELERVPGVTGNLEITDALSLEQMAIFVAEKCRYLWRSGYYPRDVAVLFSKARDIETYKEKIILALRRRNMSQLIEEPSSLMQVREESEFLGNNILLTSVQQFSGMERSVVFGIIPAEFETAIFYNVLLCLASRARTHLYIIKLLL

SEQ ID NO: 114 - protein, 891 aa, Pan paniscus
MSLRIDVDTNFPECVVDAGKVTLGTQQRQEMDPRLREKQNEIILRAVCALLNSGGGVIKAEIENKGYNYERHGVGLDVPPIFRSHLDKMQKENHFLIFVKSWNTEAGVPLATLCSNLYHRERTSTDVMDSQEAVAFLKCRTQTHTNINVSNSLGPQAAQGSVQYEGNINVSATALFDRKRLQYLEKLNLPESTHVEFVMFSTDVSHCVKDRLPKCVSAFANTEGGYVFFGVHNETCQVIGCEKEKIDLTSLRASIDGCIKKLPVHHFCTQRPEIKYVLNFLEVHDKGALRGYVCAIKVEKFCCAVFAKVPSSWQVKDNSVRKLPTREWTAWMLEADPDLSRCPEMVLELSLSSATPRSKPVCIHKNSECLKEQQKRYFPVFSDRVVYTPESLYKELFSQHKGLRDLINTEMRPFSQGILIFSQSWAVDLGLQEKQGVICDALLISQNNTPILYTIFSKWDAGCKGYSMIVAYSLKQKLVNKGGYSGRLCITPLVCVLNSDRKAQSVYSSYLQIYPESYNFMTPQHMEALLQSLVIVLLGFKSFLSEELGSEVLNLLTNKQYELLSKNLRKTRELFVHGLPGSGKTILALRIMEKIRNVFHCEPANILYICENQPLKKLVSFSKKNICQPVTRKTFMKNNFEHIQHIVIDDAQNFRTEDGDWYGKAKFITQTARDGPGVLWIFLDYFQTNHLSCSGLPPPSDQYPREEINRVVRNAGPIANYLQQVMQEARQNPPPNLPPGSLVMLYEPKWAQGVPGNLEIIEDLNLEEILIYVANKCRFLLRNGYSPKDIAVLFTKASEVEKYKDRLLTAMRKRKLSQLDEESDLLLQIGDASDVLTDHIVLDSVCRFSGLERNIVFGINPGVAPPAGAYNLLLCLASRAKRHLYILKASV

SEQ ID NO: 115 - protein, 901 aa, Pan paniscus
MEANQCPLVVEPSYPDLVINVGEVTLGEENRKKLQKIQRDQEKERVMRAACALLNSGGGVIRMAKKVEHPVEMGLDLEQSLRELIQSSDLQAFFETKQQGRCFYIFVKSWSSGPFPEDRSVKPRLCSLSSSLYRRSETSVRSMDSREAFCFLKTKRKPKILEEGPFHKIHKGVYQELPNSDPADPNSDPADLIFQKDYLEYGEILPFPESQLVEFKQFSTKHIQEYVKRTIPEYVPAFANTGGGYLFIGVDDKSRKVLGCAKENVDPDSLRRKIEQAIYKLPCVHFCQPQRPITFTLKIVDVLKRGELYGYACMIRVNPFCCAVFSEAPNSWIVEDKYVCRLTTEKWVGMMTDTDPDLLQLSEDFECQLSLCSGPPLSRPVYSKKGLEHKKELQQLLFSVPPGYLRYTPESLWRDLISEHNGLEELINKQMQPFFRGILIFSRSWAVDLNLQEKPGVICDALLIAQNSTPILYTILREQDAEGQDYCTRTAFTLKQKLVNMGGYTGKVCVRAKVLCLSPESSAEALEAAVSPMDYPASYSLAGTQHMEALLQSLVIVLLGFRSLLSDQLGCEILNLLTAQQYEIFSRSLRKNRELFVHGLPGSGKTIMAMKIMEKIRNVFHCEAHRILYVCENQPLRNFISDRNICRAETRKTFLRENFEHIQHIVIDEAQNFRTEDGDWYGKAKSITRRAKGGSGILWIFLDYFQTSHLDCSGLPPLSDQYPREELTRIVRNADPIAKYLQKEMQVIRNNPSFNIPTGCLEVLPEAEWSQGVQGTLRIKKYLTVEQIMTCVADTCRRFFDRGYSPKDVAVLVSTAKEVEHYKYELLKAMRKKRIVQLSDACDMLGDHIVLDSVRRFSGLERSLVFGIHPRTADPAILPNILICLASRAKQHLYIFPWGGH

SEQ ID NO: 116 - protein, 579 aa, Pan paniscus
MNISVDLETIYAELVLDVGRVTLGENSRKKMKDCKLRKKQNESVSRAMCALLNSGGGVIKAEIENEDYSYTKDGIGLDLENSFSNILLFVPEYLDFMQNGNYFLIFVKSWSLNTSGLRITTLSSNLYKRDITSAKVMNATAALEFLKDMKKTRGRLYLRPELLVAKRPRVDIQEENNMKALAGVFFDRTELDRKEKLTFTESTHVEIKNFSTEKLLQRIKEILPQYVSAFANTDGGYLFIGLNEDKEIIGFKAEMSDLDNLEREIEKSIRKMPVHHFCMEKKKINYSCKFLGVYDKGSLCGYVCALRVERFCCAVFAKEPDSWHVKDNRVMQLTRKEWIQFMVEAEPKFSSSYEEVISQINTSLPAPHSWPLLEWQRQRHHCPGLSGRITYSPENLCRKLFLQHEGLKQLICEEMDSVRKGSLIFSRSWSVDLGLQENHKVLCDALLISQDSPPVLYTFHMVQDEEFKGYSTQTALTLKQKLAKIGGYTKKVCVMTKIFYLSPEGMTSCQYDLRSQVIYPESYYFTRRKYLLKALFKALKRLKSLRDQFSFAENLYQIIGIDCFQKNDKKMFKSCRRLT

SEQ ID NO: 117 - protein, 579 aa, Pan paniscus; identical to SEQ ID NO: 116

SEQ ID NO: 118 - protein, 591 aa, Pan paniscus
MDLARKEFLRGNGLAAGKMNISIDLDTNYAELVLNVGRVTLGENNRKKMKDCQLRKQQNENVSRAVCALLNSGGGFIKAEVENKGYSYKKDGIGLDLENSFSNMLPFVPNFLDFMQNGNYFHIFVKSWSLETSGPQIATLSSSLYKRDVTSAKVMNASAALEFLKDMEKTGGRAYLRPEFPAKRACVDVQEESNMEALAADFFNRTELGYKEKLTFTESTHVEIKNFSTEKLLQRITEILPQYVSAFANTDGGYLFVGINEDKEIIGFKAEKSYLTKLEEVTKNSIGKLPVHHFCVEKGTINYLCKFLGVYDKGRLCGYVYALRVERFCCAVFAKKPDSWHVKDNRVKQLTEKEWIQFMVDSEPVWEELPSPASTSSLVSLVSQSCRFREYINFKIQPLRYHLPGLSEKITCAPKTFCRNLFSQHEGLKQLICEEMGSVSKGSLIFSRSWSLDLGLQENHKVLCDALLISQDKPPVLYTFHMVQDEEFKDYSTQTAQTLKQKLAKIGGYTKKVCVMTKIFYLSPEGKTSCQYDLNSQVIYPESYYWTTAQTMKDLEKALSNILPKENQIFLFVCLFRFCLFVGWFVCFFLR

SEQ ID NO: 119 - protein, 898 aa, Pan paniscus
  misc_feature (252)..(252): Xaa can be any naturally occurring amino acid
MEANHCSLGVYPSYPDLVIDVGEVTLGEENRKKLQKTQRDQERARVIRAACALLNSGGGVIQMEMANRDERPTEMGLDLEESLRKLIQYPYLQVFFETKQHGRCFYIFVKSWSGDPFLKDGSFNSRICSLSSSLYCRSGASVLRMNSRQAFDFLKTKERQSKYNLINEGSPPSKIMKAVYQNISESNPAYEVFQTDTIEYGEILSFPESPSMEFKQFSTKHIQQYVENIIPEYISAFANTEGGYLFIGVDDXNRKVLGCAKEQVDPDSLKNVIARAISKLPIVHFCSSKPRVEYSTKIVEVFCGKELYGYLCVIKVKAFCCVVFSEAPKSWMVREKYIRPLTTEEWVEKMMDADPEFPPDFAEAFESQLSLSDSPSLCRPVYSKKGLEHKADLQQHLFPVPPGHLECTPESLWKELSLQHEGLKELIHKQMRPFSQGIVILSRSWAVDLNLQEKPGVICDALLIAQNSTPILYTILREQDAEGQDYCTRTAFTLKQKLVNMGGYTGKVCVKAKVLCLSPESSAEALEAAVSPMDYPASYSLAGTQHMEALLQSLVIVLLGFRSLLSDQLGCEVLNLLTAQQYEIFSRSLRKNRELFVHGLPGSGKTIMAMKIMEKIRNVFHCEAHRILYVCENQPLRNFISDRNICRAETRKTFLRENFEHIQHIVIDEAQNFRTEDGDWYRKAKTITQREKDCPGVLRIFLDYFQTSHLGHSGLPPLSAQYPREELTRVVRNADEIAEYIQQEMQLIIENPPTNIPHEYLAILSEAKWVPGVPGNTKIIKNFTLEQIATYVADTCRCFFERGYSPKDVAVLVSTATEVEQYQSKLLKAMRKKKMVVQLSDACDMLGEHIVLDSVRRFSGLERSIVFGIHPRTADPAILPNILICLASRAKQHLYIFL

SEQ ID NO: 120 - protein, 1029 aa, Pan paniscus
  misc_feature (931)..(931): Xaa can be any naturally occurring amino acid
  misc_feature (952)..(952): Xaa can be any naturally occurring amino acid
MESLKTDTEMPYPEVIVDVGRVIFGEENRKKMTNSCLKRSENSRIIRAICALLNSGGGVIKAEIDDKTYSYQCHGLGQDLETSFQKLLPSGSQKYLDYMQQGHNLLIFVKSWSPDVFSLPLRICSLRSNLYRRDVTSAINLSASSALELLREKGFRAQRGRPRVKKLHPQQVLNRYIQEEEGMRILASEFFKKDKLMYKEKLNFTESTHVEFKRFTTKKVIPRIKEMLPHYVSAFANTQGGYVLIGVDDKSKEVVGCKWEKVNPDLLKKEIENCIEKLPTFHFCCEKPKVNFTTKILNVYQKDVLDGYVCVIQVEPFCFVVFAEAPDSWIMKDNSVTRLTAEQWVVMMLDTQSAPSSLVTDYNSCLISSASSARKSPGYPVKVHEFKEALQRHLFPVTQEEVQFKPESLCKKLFSDHKELEGLMKTLIHPCSQGIVIFSRSWAGDVGFRKEQNVLCDALLIAVNSPVVLYTILIDPDWPGGLEYARNTAHQLKQKLQTVGGYTGKVCIIPRLIHLSSTQSRPGEIPLHYPRSYRLADEEEMEDLLQALVVVSLSSRSLLSDQMGCEFFNLLIMEQSQLLSESLQKTRELFIYCFPGVRKTALAIKIMEKIKDLFHCKPKEILYVCERRLPKRNFVDFNQQTTCQAVTRKTFMQGEFLKIKHIVMDETENFCSKYGNWYMKAKNITHPKAKGTGSENLHHGILWLFLDPFQIHHADVNGLPPPSAQFPRKTITSGIHCALEIAKVMKEEMKRIKENPPSNMSPDTLALFSETAYEEATCAQALPGVCETKTNLTTEQIANYVARKCHSLFQCGYLPKDIAILCRRGEDTGRYRLALLKAMELIETHRPSEVVFSPATGVWGSHIVLDSIQQFSGLERTVVFGLSPELLPGYLRCTLESLWKELSSQNEGLEELINKQTQPFSWGIVVLSRSXAVDLNLQEKPGVICDALLIAXEQPWQGQDYCTRTALTLKQKLVNMGGYTGKVCVRAKVLCLSPESSAEALEAAVSPTDYPASYSFRHPAHWKPCCSPS

SEQ ID NO: 121 - protein, 889 aa, Macaca mulatta
MSLRIDSNTNFPECVVDAGKVILGTRWRQEMDPRLREKQNEIILQAVCALLNSGGGIIKAEIENKGYNYESHGVGLDVPPIFRSHLDEMQQENHFLIFVKSWNTEAGVPLATLCSNLYHRQRTSTDVMDSQEALAFLKRRTQTLTNINVSNSLSPQAAQSSVQYEGNTKALAAALFDRKRLQYLEKLNFPESKHVEFVMFSTDVSHRVKDRLPKCVSALANTEGGYVFFGVHDGTCQVIGCEKEKIDLTSLRASIDGCIKKLPVHHFCTQRPEIQYVLNFLEVHDKGALRGYVCAIKVEQFCCAVFAKAPSSWQVKDNRVRQLPTREWTAWMMEADPDLSRCPEMVLALSLSSATPRSKTVCIHKNLERLKEQQKRYFPVFSDRVVYTPESLYKELFSQHKGLRDLINTEMRPFSQGILIFSQSWAVDLGLQEKQGVICDALLISQNNTPILYTIFSKWDAGCKGYSMVVAYSLKQKLVNKGGYTGRLCITPLVCVLNSDRKAQSVCGSYLQIYPESYNFMTPQHMEALLQSLVIVLLGFKSFLSEELGSEVLNLLTNKQYELLSKNLRKTKELFVHGLPGSGKTILALKIMEKIKNVFHCEPTDILYICENYPLKKLVSKKNICQPVTRKTFMKNNFERVQHIVIDDAQNFRTEDGDWYGKAKFITQTARDGPGVLWIFLDYFQTNHLSCSGLPPLSDQYPREEITRVVRSADPIANYLQQIMQEARQNLPPNLPPGSLVMLYEPKWAQGVPGNLEIIEDLNLEEILVYVADKCRFLLQNGYSPRDIAVLFTKASEVEKYKDRLLTAMRKRKMSQLDEECDLLLQVGDALDVLTNHIVLDSVCRFSGLERNIVFGINPGVTQQAGVYNLLLCLASRAKRHLYILKASV

SEQ ID NO: 122 - protein, 889 aa, Macaca mulatta; identical to SEQ ID NO: 121

SEQ ID NO: 123 - protein, 889 aa, Macaca mulatta; identical to SEQ ID NO: 121

SEQ ID NO: 124 - protein, 889 aa, Macaca mulatta; identical to SEQ ID NO: 121

SEQ ID NO: 125 - protein, 889 aa, Macaca mulatta; identical to SEQ ID NO: 121

SEQ ID NO: 126 - protein, 889 aa, Macaca mulatta; identical to SEQ ID NO: 121

SEQ ID NO: 127 - protein, 889 aa, Macaca mulatta; identical to SEQ ID NO: 121

SEQ ID NO: 128 - protein, 889 aa, Macaca mulatta
MSLRIDSNTNFPECVVDAGKVILGTRWRQEMDPRLREKQNEIILQAVCALLNSGGGIIKAEIENKGYNYESHGVGLDVPPIFRSHLDEMQQENHFLIFVKSWNTEAGVPLATLCSNLYHRQRTSTDVMDSQEALAFLKRRTQSLTNINVSNSLSPQAAQSSVQYEGNTKALAAALFDRKRLQYLEKLNFPESKHVEFVMFSTDVSHRVKDRLPKCVSALANTEGGYVFFGVHDGTCQVIGCEKEKIDLTSLRASIDGCIKKLPVHHFCTQRPEIQYVLNFLEVHDKGALRGYVCAIKVEQFCCAVFAKAPSSWQVKDNRVRQLPTREWTAWMMEADPDLSRCPEMVLALSLSSATPRSKTVCIHKNLERLKEQQKRYFPVFSDRVVYTPESLYKELFSQHKGLRDLINTEMRPFSQGILIFSQSWAVDLGLQEKQGVICDALLISQNNTPILYTIFSKWDAGCKGYSMVVAYSLKQKLVNKGGYTGRLCITPLVCVLNSDRKAQSVCGSYLQIYPESYNFMTPQHMEALLQSLVIVLLGFKSFLSEELGSEVLNLLTNKQYELLSKNLRKTKELFVHGLPGSGKTILALKIMEKIKNVFHCEPTDILYICENYPLKKLVSKKNICQPVTRKTFMKNNFERVQHIVIDDAQNFRTEDGDWYGKAKFITQTARDGPGVLWIFLDYFQTNHLSCSGLPPLSDQYPREEITRVVRSADPIANYLQQIMQEARQNLPPNLPPGSLVMLYEPKWAQGVPGNLEIIEDLNLEEILVYVADKCRFLLQNGYSPRDIAVLFTKASEVEKYKDRLLTAMRKRKMSQLDEECDLLLQVGDALDVLTNHIVLDSVCRFSGLERNIVFGINPGVTQQAGVYNLLLCLASRAKRHLYILKASV

SEQ ID NO: 129 - protein, 891 aa, Macaca mulatta
MEANQCSLVVEPSYPDLVINVGEVTLGEENRNNLQKVQRDQEKERVLRAACALLNSGGGVIRMAKKDEHLVDMGLDLEKSLRELIQSSDLQAFFETKQQGRRFYIFVKSWSSGLLPEDGSVKPRLCSLRSSLHRRSGTSELLMNSREAFCFLKKKKNDAKILEEGPFHKVHKGIHQELPNSDPADPIFQKDYLEYGEILPFPESQSVEFKRFSTKHIQEYVKKIIPEYVSAFANTDGGYLFIGVDDKSKKVLGCAKENVDLDSLRRKIVKTIHKLPCVHFCQAQCQITFTLKIVDVLARGELYGYACMIRVEPFCCAVFSEAPNSWIVEDKYVCSLTTEKWVGMMTDTDPDLLQLSEDFECQLSLSSGPPLSRPVYSKKGLQHKKELQQLLFSVPPGHLRYTPESLWRDLTSEHEGLQELINKQMQPFSQGIVILSRSWAVDLNLQEKPGVICDALLIAQNSTPILYTVLREQDAEGQDYCTRTAFTLKQNLVNVGGYTGKVCVRAKVLCLSPESSAEALEAAVSPMDYPASYRLAGTQHMEALLQSLVIVLLGFRSLLSDQLGCEVLNLLTAQQYEIFSRSLRKNRELFVHGLPGSGKTIMAMKIMEKIRNVFHCEEKRILYICENQPLRNFISDKNICQAETRKTFIKGKFGHIQHIVIDEAQNFRSEDGDWYGKAKTITRRAKDGPGILWIFLDYFQTSHLNCSGLPLLSDQYPREELTRIVRNADPIAKYLQKEMQVIRNNPSFNIPPGSLEVLLEAEWSQGVQGTLQIKKHLTVEQIVTFVADTCRFFFERGYSPKDVAVLVSTAKEVERYKYELLKAMRKKRVVQLRDACDMLGDHIVLDSVRRFSGLERNIVFGIHPRTTDPAILPNILICLASRAKQHLYIFL

SEQ ID NO: 130 - protein, 897 aa, Macaca mulatta
MEANHCSLGVDLSYPDLVIDVGEVTLGEENRKKLQKTQRNQEKARVIRAACALLNSGGGVIRMEMANKDERPVEMGLDLEESLRNLIQYRYLQAFFETKQQGRCFYIFVKSWSGDPFPKDGSFNSRICSLSTSLYCRSGTSVLPMSSRQAFDFLKTKEGQSKYNLINEGSPPTKIMKAVYQNISDSNPAYKVFQTDTIEYDEILSFPESPSIEFKQFSTEHIQQYVENIIPEYIPAFANTEGGYLFIGVDDKSRKVLGCAKSKVDPNSLKNVIARAISKLPIVHFCFSKPPVECSTKIIEVFRGKELYGYLCVIKVKAFCCVVFSEAPRSWMVKQKYVCPLTIEEWLEKMMDADPEFPPDFAEAFESQLSLSDSPSLCRPVYSKKGLEHKADLQRHLFPVPPGHLQYTPESLWKELSSQHEGLEELINKQVQPFSQGIVILSRSWAVDLNLQEKPGVICDALLIAQNSTPILYTVLREQDAEGQDYCTRTAFTLKQNLVNVGGYTGKVCVRAKVLCLSPESSAEALEAAVSPMDYPASYRLAGTQHMEALLQSLVIVLLGFRSLLSDQLGCEVLNLLTAQQYEIFSKNLRKNRELFVHGLPGSGKTIMAMKIVEKIRNVFHCEAERILYVCENQPLRNFISDKKICQAETRKTFMRGYFDHIQHIIIDEAQNFRTEDGYWYEKAKTITQREKDCPGVLWIFLDYFQTSHLGHSGLPLLSAQYPREELTRVVRNADEIAKYIQQEMQLIIENPPVNIPHGYLAILSEAKWAPGVSGNKKIIKNWTMEQIVTFVADTCRLFFERGYSPKDVAVLVSTTREVEHYWHELSKALRKKRVVGLSDASDMSGDRIVLDSVRRFSGLERNIVFGIHPRTTDPAILPNILICLASRAKQHLYIFL

SEQ ID NO: 131 - protein, 897 aa, Macaca mulatta; identical to SEQ ID NO: 130

SEQ ID NO: 132 - protein, 897 aa, Macaca mulatta; identical to SEQ ID NO: 130

SEQ ID NO: 133 - protein, 897 aa, Macaca mulatta
MEANHCSLGVDLSYPDLVIDVGEVTLGEENRKKLQKTQRNQEKARVIRAACALLNSGGGVIRMEMANKDERPVEMGLDLEESLRNLIQYRYLQAFFETKQQGRRFYIFVKSWSGDPFPKDGSFNSRICSLSTSLYCRSGTSVLPMNSRQAFDFLKTKEGQSKYNLINEGSPPTKIMKAVYQNISDSNPAYKVFQTDTIEYDEILSFPESPSIEFKQFSTEHIQQYVENIIPEYIPAFANTEGGYLFIGVDDKSRKVLGCAKNKVDPNSLKNVIARAISKLPIVHFCSSKPPVECSTKIIEVFRGKELYGYLCVIKVKAFCCVVFSEAPRSWMVKEKYVCPLTTEEWVEKMMDADPEFPPDFAEAFESQLSLSDSPSLCRPVYSKKGLEHKADLQRHLFPVPPGHLQYTPESLWKELSSQHEGLEELINKQVQPFSQGIVILSRSWAVDLNLQEKPGVICDALLIARNSTPILYTVLREQDAEGQDYCTRTAFTLKQNLVNVGGYTGKVCVRAKVLCLSPESSAEALEAAVSPMDYPASYSLAGTRHMEALLQSLVIVLLGFRSLLSDQLGCEVLNLLTAQQYEIFSKNLRKNRELFVHGLPGSGKTIMAMKIMEKIRNVFHCEAERILYVCENQPLRNFISDKKICQAETRKTFMREYFDHIQHIIIDEAQNFRTEDGYWYEKAKTITQREKDCPGVLWIFLDYFQTSHLGRSGLPLLSAQYPREELTRVVRNADEIAEYIQQEMQRIIENPPVNIPHGYLAILSEAKWAPGVSGNKKIIKNWTMEQIVTFVADTCRFFFERGYSPKDVAVLVSTTREVEHYWHELSKALRKKRVVGLSDASDMSGDRIVLDSVRRFSGLERNIVFGIHPRTTDPAILPNILICLASRAKQHLYIFL

SEQ ID NO: 134 - protein, 912 aa, Macaca mulatta
MESLKTDTEMPYPEVIVDVGKVIFGEENRKKMTNSYLKRSENSRIIRAICALLNSGGGVIKAEIDDKTYSYQCHGLGQDLETSFQKLLPSGSQKYLDYMQQGHNLLIFVKSWSPDVFSLPLRICSLRSNLYQRDVTSAINLSASSALELLREKCFRAQRGRPRVKKLHPQQVLDRYIQEEEDMRILASEFFKKDRLMYKEKLNFTESTHVEFKRFTTKKVIPRIKEMLPHYVSAFANTQGGYVLIGVDDKSKEVVGCKWEKVNPDLLKKEIENCIEKLPTFHFCCEKPKVNFTTKILNVYQKDVLDGYVCVIQVEPFCCVVFAEAPDSWIMKDNSVTRLTAEQWVVMMLDTQSAPSSLATDYNSYLISSASSARKSPGYPIKVHEFKEGLQRHLFPVTQQEVQFKPESLCKKLFSDHKELEGLMKTLIHPCSRGIVIFSRSWAGDVGFRKEQNVLCDALLIAVNSPMVLYTILIDPDWLGGLEYARNTAHQLKQKLQAVGGYTGKVCIIPRLIHLTSTQSRAGDIPLRYPRSYSLADEEEMEDLLQALVVVCLCSRSLLSDQLGCEFFNLLIMEQSQLLSESLQETRELFIHCFPGIRKTALAIKIMEKIKDLFHCKPKEILYVCESDSLKDFVTQQTTCQAVTRKTFMQGEFLKIKHIVMDETENFCSKFGNWYVKAKNITHPKAKGAGSENLHHGVLWLFLDPFQIHHADVSGLPPPSAQFPRKTITGGIHCALEIANVMKEEMKRIKENPPSNISPDTLALFRETAYEEAMCAQGLPGVCETKTNLTTEQIANYVAGKCHSLFQCGYLPKDIAILCRRGEDRGRYKLALLKAMELIETHRASEVVFSQATGVCGSHIVLDSIQQFSGLERTIVFGLSPECDQSEEFHKLCFASRAIKHLYLLYEKRATF

SEQ ID NO: 135 - protein, 891 aa, Pongo abelii
MSLRIDGNTNFPECVVDAGKVILGTQQRQEMDPRLREKQNEIILRAVCALLNSGGGIIKAEIENKGYNYEHHGVGLDVPPIFRSHLDEMQQESHFLIFVKSWNTEAGVPLATLCSNLYHRQRTSTDVMDSQEALAFLKWRTQTPMNINVSNSLSPQAAQGSVQYEGNINASAAALFDRKRLQYLEKLNLPESTHVEFVMFSTDVSHCVKDRLPKCVSAFANTEGGYVFFGVHDETCQVIGCEKEKIDLTSLRASIDSCIKKLPVHHFCTQRPEIKYVLNFLEVHDKGALHGYVCAIKVEQFCCVVFAKVPSSWQVKDNCVRQLPTREWTAWMMKADPDLSRCPEMVLELSLSSATPRSKPVCIHKNLECLKEQQKRYFPVFSDRVVYTPESLYKELFSQHKGLRDLINTEMRPFSQGILIFSQSWAVDLGLQEKQGVICDALLISQNNTPILYTIFSKWDTGCKGYSMIVAYSLKQKLVNKGGYTGRLCITPLVCVLNSDRKAQSVYGSYLQIYPESYNFMTPQHMEALLQSLVIVLLGFKSLLSEELGSEVLNLLTNKQYELLSKNLRKTRELFVHGLPGSGKTILALRIMEKIRNVFHCEPANILYICENQPLKKLVSFSKKNICQPVTRKTFMKNNFEHIQHIIIDDAQNFRTEDGDWYGKAKFITQTARDGPGVLWIFLDYFQTNHLSCSGLPPPSDQYPREEINRVVRNAGPIANYLQQIMQEARQNPPPNLPPGSLVMLYEPKWAQGVPGNLEIIEDLNLEEILIYVANKCRFLLRNGYSPKDIAVLFTKASEVEKYKDRLLTAMKKRKMSQLDEESDLLLQIVDASDVLTNHIVLDSVCRFSGLERNIVFGINPGVAPPAGVYNLLLCLASRAKRHLYILKASV

SEQ ID NO: 136 - protein, 909 aa, Pongo abelii
MEANQCPVVVEPSYPDLVINVGEVTLGEENRKKLQKIQRDHEKERVMQAACALLNSGGGVIRMAKKVEHPVEMGLDLEQSLRELIQSSDLQAFFETKQQGRRFYIFVKSWSSGPFPEDGSVKPRLCSLSSSLYRRSETSVRSMDSREAFCFLKAKKRKAKILEEGPFHKIHKGIHQELPNSDPADPNSDPADPNSDPADPIFQKDYLEYGEILPFPESQLVEFKQFSTKHIQEYVKKIIPEYVPAFANTGGGYLFIGVDDKSRKVLGCAKENVDPDSLRRKIEKAIYKLPCVHFCQPQRPITFTLKIVDVLKRGELYGYACMIRVKPFCCAVFSEAPNSWIVEDKYVCSLTTEKWVGMMTDTDPDLLQLSKDFECQLSLSSGPPLSRPVYSKKGLEHKKELQQLLFSVPPGYLRYTPESLWRDLTSEHEGLGELINKQMRPFFRGILIFSRSWAVDLNLQEKPGVICDALLIAQNSTPILYTILREQDAEGQDYCTRTAFTLKQKLVNMGGYTGKVCVKAKVLCLRPESSAEALEASVSPMDYPASYSLAGTEHMEALLQSLVIVLLGFRSLLSDQLGCEVLNLLTAKQYEILSRSLRKNRELFVHGLPGSGKTIIAINIMEKIRNVFHCEEKRILYVCENQPLRNFISHKNICQAETRKTFLRENFEHIQHIVIDEAQNFRTEDGDWYGKAKTITRRAKDGPGILWIFLDYFQTSHLDCSGLPPLSDQYSIEELTRIVRNADPIAKYLQKEMQVIRNNPSFNIPTGCLEVLLEAEWSQGVQGTLQIKKHLTVEQIMTYVADTCRRFFERGYSPKDVAVLVSTAKEVEHYKYELLKAMRKKRVVQLSDACDMLGDHIVLDSVRRFSGLERNIVFGIHPRTADPAILPNILICLASRAKQHLYIFPWGGH

SEQ ID NO: 137 - protein, 578 aa, Pongo abelii
MNISVDLETNYAELVLDVGRVTLGEKSRKKMKDCKLRKKQNESVSRAMCALLNSGGGVIKAEIENEDYSYTKDGIGLDLENSFSNILLFVPEYLDFMQNGNYFLIFVKSWSLNTSGLRITTLSSNLYKRDITSAKVMNAAAALEFLKDMKKTRGRLYLRPELLTESPRVDIQEESNMKALAGGFFDRTELDRKEKLTFTESTHVEIKNFSTEKLLQRIKEILPQYVSAFANTDGGYLFIGLNEDKEIIGFKAEMSDLDKLEREIENSISKMPVHHFCVEKKKINYSCKFLGVYDKGSLCGYVCALRVERFCCAVFAKEPDSWHVKDNRVMQLTRKEWIQFMVEAEPKFSRSYKELFSQINMSSPAPHSWPLLEWERQRHHCPGLSGRVTYTPENLCRKLFLQHEGLKQLICEEMGSVRKGSLIFSRSWSLDLGLQENHKVLCDALLISQDKPPVLYTFHMVQDEEFKGYSTQTALTLKQKLAKIGGYTKKVCVMTKIFYLSPEGKTSCQYDLRSQVIYPESYYFTRRKYLLKALFEALKRLKSLRDQFSFAENLYQIIGIDCFQKNDKKMFKSCRRLT

SEQ ID NO: 138 - protein, 578 aa, Pongo abelii; identical to SEQ ID NO: 137

SEQ ID NO: 139 - protein, 619 aa, Pongo abelii
MQLSEGLAAHGTRRAGKWKRTQVPLLGEECADMDLARKEFLLGNGLAAGKMNISIDLDTNYAELVLNVGRVTLGENNRRKMKDSQLRKQQNENVSRAVCALLNSGGGFIKAEVENEDYSYKKDGIGLDLENSFSNMLPFVPNFLDFMQNGNYFHIFVKSWSLETSGPQIATLSSSLYKRDVTSAKVMNASAALEFLKDMEKTGGRAYLRPESPAKRACVDVQEESNMEALAADFFNRTELNYKEKLTFTESTHVEIKNFATEKLLQRITEILPQYVSAFANTDGGYLFVGLNEDKEIIGFKAEKSYLTKLEEVTKNSIGKLPVHHFCVEKGTINYLCKSLGVYDKGRLCGYVYALRVERFCCAVFAKKPDSWHVKDNRVKQLTEKEWIQFMVDSESVCEELPSPASTSSPVSQSCPLCEYINFKIQPLRYHLPGLSEKITFAPKTLCRNLFSQHEGLKQLICEEMGSVSKGSLIFSRSWSLDLGLQENHKVLCDALLISQDKPPVLYTFHMVQDEEFKGYSTQTAQTLKQKLAKIGGYTKKVCVMTKIFYLSPEGKTSCQYDLNSQVIYPESYYWTTAQTMKDLEKALSNILPKENQIFLFVCLFRFCLFVCLFVFFLR

SEQ ID NO: 140 - protein, 619 aa, Homo sapiens; identical to SEQ ID NO: 139

SEQ ID NO: 141 - protein, 566 aa, Pongo abelii
MVGEKYIRPLTTEEWVEKMMDADPEFPPDFAEAFESQLSLSDSPSLCRPVHSKKGLEHKADLQQHLFPVPPGHLQCTPESLWKELSLQHEGLKKLIHKQMQPFSQGIVILSRSWAVDLNLQEKPGVICDALLIAQNSTPILYTILREQDAEGQDYCTRTAFTLKQKLVNMGGYTGKVCVKAKVLCLRPESSTEALEAAVSPMDYPASYSLAGTQHMEALLQSLVIVLLGFRSLLSDQLGCEVLNLLTAQQYEILSRSLRKNRELFVHGLPGSGKTIIAIKIMEKIRNVFHCEAHRILYVCENQPLRNFISGRNICRAGTRKTLMREDFVDIQHIIIDEAQNFSTEDGDWYGKAKTITQREKDCPGVLWIFLDYFQTSHLGHSGLPPLSAQYPREELTTVVRNADEIAEYVQQEMQLIIENPPINIPHGYLAILSEAKWVPGVSGHKKIIKNFTLEQIVTYVADTCRLFFERGYSPKDVAVLVSTTTEVEQYQSKLLKAMRKKMVVQLSDACDMLGDHIVLDSVRRFSGLERSIVFGIHPRTTDPAILPNILICLASRAKQHLYIFL

SEQ ID NO: 142 - protein, 579 aa, Pongo abelii
MEANHCSLAPKSWMVGEKYIRPLTTEEWVEKMMDADPEFPPDFAEAFESQLSLSDSPSLCRPVHSKKGLEHKADLQQHLFPVPPGHLQCTPESLWKELSLQHEGLKKLIHKQMQPFSQGIVILSRSWAVDLNLQEKPGVICDALLIAQNSTPILYTILREQDAEGQDYCTRTAFTLKQKLVNMGGYTGKVCVKAKVLCLRPESSTEALEAAVSPMDYPASYSLAGTQHMEALLQSLVIVLLGFRSLLSDQLGCEVLNLLTAQQYEILSRSLRKNRELFVHGLPGSGKTIIAIKIMEKIRNVFHCEAHRILYVCENQPLRNFISGRNICRAGTRKTLMREDFVDIQHIIIDEAQNFSTEDGDWYGKAKTITQREKDCPGVLWIFLDYFQTSHLGHSGLPPLSAQYPREELTTVVRNADEIAEYVQQEMQLIIENPPINIPHGYLAILSEAKWVPGVSGHKKIIKNFTLEQIVTYVADTCRLFFERGYSPKDVAVLVSTTTEVEQYQSKLLKAMRKKMVVQLSDACDMLGDHIVLDSVRRFSGLERSIVFGIHPRTTDPAILPNILICLASRAKQHLYIFL

SEQ ID NO: 143 - protein, 914 aa, Pongo abelii
MESLKTNTEMPYPEVIVDVGRVIFGEENRKKMTNSCLKRSENSRIIRAICALLNSGGGVIKAEIDDKTYSYQCHGLGQDLETSFQKLLPSGSQKYLDYMQQGHNLLIFVKSWSPDVFSLPLRICSLRSNLYHRDVTSAINLSASSALELLREKGFRAQRGRPRVKKLHPQEVLNRYIQEEEDMRILASEFFKKDKLMYKEKLNFTESTHVEFKRFTTKRVIPRIKEMLPHYVSAFANTQGGYVLIGVDDKSKEVVGCKWEKVNPDLLKKEIENCIEKLPTFHFCCEKPKVNFTTKILNVYQKDVLDGYVCVIQVEPFCCVVFAEAPDSWIMKDNSVTRLTAEQWVVMMLDTESVWSPDYNSCLISSASSARKSPGYPIKVHEFKEALQPTFGFQVFPLVTQEEIQFKPESLCKKLFSDHKELEGLMKTLIHPCSQGIVIFSRSWAGDVGFRKEQNVLCDALLIAVNSPVVLYTILLDPDWPGGLEYARNTAHQLKQKLQTVGGYTGKVCIIPRLIHLTSTQSRPGEIPLRYPRSYRLADEEEMEDLLQALVVVSLFSRSLLSDQLGCEFFNLLIMEQSQLLSESLQKTRELFIYCFPGVRKTALAVKIMEKIKDLFHCKPKEILYVCESDSLKDFVTQQTTCQAVTRKTFMQGEFLKIKHIVMDETENFCSKYGNWYMKAKNITHPKAKGAGSENLHHGILWLFLDPFQIHHADVNGLPPPSAQFPRKTITSGIHCALEIAKVMKEEMKRIKENPPSNMSPDTLALFRETAYEEAMCAQALPGVCETKTNLTTEQIANYVARKCHSLFQCGYLPKDIAILCRRGEDRGRYKLALLKAMELIETHRPSEVVFSPATGVWGSHIVLDSIQQFSGLERTIVFGLSPECDQSEEFHKLCFASRAIKHLYLLYEKRAAF

SEQ ID NO: 144 - protein, 891 aa, Nomascus leucogenys
MSLRIDVDTNFPECVIDAGKVILGTQQRQEMDPRLREKQNEIILQAVCALLNSGGGIIKAEIENKGYNYECHGVGLDVPPIFRSHLDEMQQENHFLIFVKSWNTEAGVPLATLCSNLYHRQRTSTDVMDSQEALAFLKWRTQTPMNINVSNSLSPQAAQGSVQYEGNINASAAALFDRKRLQYLEKLNFPESTHVEFAMFSTDVSHCVKDRLPKCVSAFANTEGGYVFFGVHDETRQVIGCAKEKTDLTSLRASIDGCIKKLPVHHFCTQRPEIKYVLNVLEVHDKGALRGYVCAIKVEQFCCAVFAKVPSSWQVKDNRVRQLPTREWTAWMMEADPDLSRCPEMVLALSLSSATPRSRTVCIHKNLECLKEQQKRYFPVFSDRVVYTPESLYKELFSKHKGLRDLINTEMRPFSQGVLIFSQSWAVDLGLQEKQGVICDALLISQNNTPILYTIFSKWDAGCKGYSMIVAYSLKQKLVNKGGYTGRLCITPLVCVLNSDRKAQSVYGSDLQIYPESYNVMTAQNMEALLQSLVIVLLGFKSFLSKELGSEVLNLLTNKQYELLSKNLHKTKELFVHGLPGSGKTILALKIMEKIRNVFHCEPANILYICENQPLKKLVSFSKKNICQPVTRKTFMKNNFEQIQHIIIDDAQNFRTEDGDWYGKAKFITQTARDGPGVLWIFLDYFQTNHLSCSGLPPPSDQYPREEINRVVRNADPIANYLQQVMQEARQNPPPNLPPGSLVMPYEPKWAHGVPGNLEIIEDLNLEEILIYVANKCRFLLRNGYSPKDIAVLFTKASEVEKYKDRLLTAMRKRKMSQLDEESDLLLQIGDASDVLTDHIVLDSVCRFSGLERNIVFGINPGVAPPAGVYNLLLCLASRAKRHLYILKPSV

SEQ ID NO: 145 - protein, 895 aa, Nomascus leucogenys
MAANQYPLVVEPSYPDLVINVGEVTLGEENRRRLQKIQRDREKERVTRAACALLNSGGGVIQMAKKVEHPVEMGLDLEQSLRDLIQSSDLQAFFETKQQGRCFYIFVKSWSSGPFPEDGSVEPRLCSVSSSLHRRSETSVRSMDSREAFIFLKTKKRNAKILEEGPFHKIHKGIHQELPNSDPADPIFQKDYLEYGEILPFPESQLVEFKQFSTKHIQEYVKKTISEYVPAFANTKGGYLFIGVDDKSRKVLGCAKENVDPDSLRRKIEKAIYKLPCVHFCQPQCPITFALRIVDVLKRGELYGYACMIRVKPFCCAVFSEAPNSWIVEDKYICSLTTEKWVGMMTDTDPDLLQLSKDFECQLSLSSGPPLSRPVYSKKGLEHKKELQQLLFSVPPEYLQYTPESLWRDLTSEHEGLEELINEQMQPFFRGILIFSRSWAVDLNLQEKPGVICDALLIAQNSTPILYTVLREQDAEGQDYCTRTAFTLKQKLVNVGGYTGKVCVRAKVLCLSPESSAEALEAAVSPMDYPASYSLAGTQHMEALLQSLVIVLLGFRSLLSDQLHCEVLNLLTAQQYEIFSRSLRKNRELFVHGLPGSGKTIMAMKIMEKIRNVFHCEEKRILYVCENQPLRNFISHKNICQAETRKTFLRENFEHIQHIVIDEAQNFRTEDGDWYGKAKTITRRAKDGPGILWIFLDYFQTSHLDCSGLPPLSDQYPREELTRIVRNADPIAKYLQKEMQVIRNNPSFNIPTGSLEVLLEAEWSQGVQGTLQIKKHMTVEQIMTYVADTCRLLFERGYSPTDVAVLVSTAKEVEHYKYELLKAMRKKRVVQLSDACDMLGDHIVLDSVRRFSGLERNIVFGIHPRTADPAILPNILICLASRAKQHLYIFPWGGH

SEQ ID NO: 146 - protein, 895 aa, Nomascus leucogenys; identical to SEQ ID NO: 145

SEQ ID NO: 147 - protein, 895 aa, Nomascus leucogenys; identical to SEQ ID NO: 145

SEQ ID NO: 148 - protein, 895 aa, Nomascus leucogenys; identical to SEQ ID NO: 145

SEQ ID NO: 149 - protein, 895 aa, Nomascus leucogenys; identical to SEQ ID NO: 145

SEQ ID NO: 150 - protein, 912 aa, Nomascus leucogenys
MENLKTDTEMPYPEVIVDVGRVIFGEENRKKMTNSCLKRSENSRIIRAICALLNSGGGVIKAEIDDKTYSYQCHGLGQDLETSFQKLLPSGSQKYLDYMQQGHNLLIFVKSWSPDVFSLPLRICSLRSNLYQRDVTSAINLSASSALELLREKGFRAQRRRPRVKKLHPQQVLNRYIQEEEDMRILASEFFKKDKLMYKEKLNFTESTHVEFKRFTTKKVIPRIKEMLPRYVSAFANTQGGYVLIGVDDKSKEVVGCKWEKVNPDLLKKEIENCIEKLPTFHFCCEKPKVNFTTKILNVYQKDVLDGYVCVIQVEPFCCVVFAEAPDSWIVKDNSVTRLTAEQWVVMMLDTQSAPSSLGTDYNSCLISSASSARKSPGYPIKVHEFKEALQRHLFPVTQEEVQFKPESLCKKLFSDHKELEGLMKTLTHPCSQGIVIFSRSWAGDIGFRKEQNVLCDALLIAVNSPVVLYAILIDPDWPGGLEYARNTAHQLKQKLQTVGGYTGKVCIIPRLIHLTSTQSRPGEIPLRYPRSYRLADEEEMEDLLQALVVVSLSSRSLLSDQLGCEFFNLLIMEQSQLLSESLQKTRELFIYCFPGVRKTALAIKIMEKIKDLFHCKPKEILYVCESDSLKDFVTQQTTCQAVTRKTFMQGDFLKIKHIVMDETENFCSKYGNWYMKAKNITHPKAKGAGSENLHRGILWFFLDPFQIHHADVNGLPPPSAQFPRKTITSGIHCALEIAKVMKEEMKRIKENPPSNMSPDTLALFRETAYEEAMCAQALPGVCETKTNLTTEQIANYVARKCHSLFQCGYLPKDIAILCRRGEDRERYKLALLKAMELIETHRPSEVVFSPATGVWGSHIVLDSIQQFSGLERTIVFGLSPERDQSEEFHKLCFASRAIKHLYLLYEKRAAF

SEQ ID NO: 151 - protein, 895 aa, Callithrix jacchus
MEANQCSLLVEPSYPDLVINVGEVTLGEENRKKLQKIQRGQEKERVLRAACALLNSGGGVIRMAKKDEHPVEMGLDLETSLRDLIQSSDLQAFFETKQEGNCFYIFVKSWSSDPFPEDGSVKPRLCSLTSSLYCRSETSVLAMDSREAFYFLKTKKKNAKILEEGPCHKVHKVIHQELPNTDPADAVFQKDYLEYGEILPFPESQLVEFKQFSTKHIQEYVKNLIPEYIPAFANTRGGYLFIGVDESRKVLGCAKENVDPLSLRWKIENAICKLPCVHFCTQPQCRITFTLKIVDVLAQGKLYGYACMIRVKPFCCAVFSEAPKSWIVKDKHVCSLTTEKWVGMMTDTDPDLVQLPKDFESQLSLSGGPPLSRPVYSKKGLEHKKELQQLLFSVPLGHLQYTPESLWKDLTSQHEGLEELINEQMQPFFRGILIFSRSWAMDLNLQEKPGVICDALLIAQNSTPILYTILREQDAEGQDYCTHTAFTLKQNLVNVGGYTGKVCVRAKVLCLSPESSTEALEAAVSPMHYPLSYRLAGTQHMEALLQSLVIVLLGFRSLLSDQLGCEVLNLLTAQQYEIFSKSLRKNRELFVHGLPGSGKTIMAMKIMEKIRNVFHCEEQRILYVCENQPLRNFISNRKICEAVTRKTFLKNHFEHIQHIIIDEAQNFRTEDGDWYGKAKTITQRAKNDPGILWIFLDYFQTSHLDHSGLPPLSEQYPREELTRIVRNADPIAKYLQKEMQIIRNNPSFNIPPGSLEVLLEAEWSQGVQGNLKIKKHFTVEQIVTYVANKCKRFFERGYSPKDVAVLVSTAREVERYKYELLKALRKKRAVQLSDACDILSDHIMLDSVRRFSGLERNIVFGIHPRTADSLILHNILVCLASRAKQHLYIFLCGDC

SEQ ID NO: 152 - protein, 968 aa, Otolemur garnettii
MSPRLRSTEDFKETAKSGTKTPEDEAKGVVVCGQIGPVSSLLPLAVFPRLCKPLTWNVSLPTNKHGTGRTFQVRNIPSAEKMSLKITFETNFAEYVLDMGKVILGTQQGRAMNPQLWEKQSETILQAICALLNSGGGVIKAEIENEDHDYETHALGFEIPPSFSSCLDVMPLQGKLLIFVKSWNTETGVRVATLCSNLYYRERASTNVVDPQEALAFLKGKAEAPMNINISHPLSPQGARGRVQYEDNIKASAAALFDKVQLQYLEKLNFPQSTHVEFIMFSADVSQCVKDRLPKCISALANTEGGYVFFGVHDETRQVIGCEADKIGILSTTVDSCMKKLSVHHFCTQRPELQRTIKFLEVRDKKVLRGYVCAIKVERFCCAVFAKEPSSWEVKDNCVKQLTTKKWVASMMEADPDLFRFPEMVLELSVSSATPHSRAVCSHKNLERLKERQKRYFPVLSDRVVYTPENLYKELFSQHKGLRELINSEIRAVSHGVLIFSHSWAVDLGLQENKGVICEALLISQNNTPILYSIFSQWNVGCKGYSMVVAQTLKQRLVNTGGYTGRLCVTPLVFLLHPDGKTQTHYGSDLQIYPESYNLMTTEDMETLLRSLVIVLFGFRSFLSDELGLEVLNLLTDKQYELLSKDFHKTRELFVHGLPGSGKTVLTLKIMEKIRNVFHCQPGDILYICENQPLKKFISTKNSCQSVTRKTFMRKNFYHIQHIIIDEAQNFCTEDGDWYRKAKTITQGRQNSPGILWIFLDYFQTNHLRCSGLPPPSDQNPREELTRVVRSAEPIADCLQNIMQGIRENPPPNLLPESLVMLHDPEWAQGVPGNFEVIEDLSLDEMVTYVADKCRFLFRNGYSPRDIGVIFSRASEMNGCKDRLLAAMRRRRMSELSEEPDVLVQIRDTSDIFGNHIVLDDVHRFSGLERNIVFGINPRAVESCIFHSLLLCLVSRAKNHLYILNVSF

SEQ ID NO: 153 - protein, 600 aa, Otolemur garnettii
MQRKLEVTSLSGSHGARKEFLLVNCIATGEMDISIDTGTEYAELVLNVGRVILGEKNRNKMKNCQLRKKQNDNVLHALCALLNSGGGVIKAEIENKDYNYCRDGIGLDLEKSFRSIRSPVSRYLDVMQKGDNFLIFVKSRRNSETSDLRIITLNTNLYKRDVTATEALDATAARDFLKDVKKTRGRSCVRPGLPAKRAGIDGVQEESNIEALADDFFKRTELAHKEKVNFTESTHVEMKDFSTGKWLQRIKEILPRYVSAFANTDGGYLFIGLNDNMEIIGVKAEMSDLHKLEHEIKECIKKLPVHHFCMKPSEIKYSCKFLPVWSFSEGIERSLCGYVCALRVERFCCAVFAENPDSWCVRDDRVRQFTTMEWIQLMVEDKPDLPRSLNEVLTFQTCVSPITVLRVLSPPKYDSESPCPGLSEEKIRTPDVHYIKLFLEIIWKEMGFVIQGSWIFFSRSWSLYVGLEGNQKVICDALLISQRTPPVLLTLCGSPDKELEGYSTQTALTLKQKLVKLGGYTRKLCVRRKVFCLSPEGRGICYYDSERDAVYPNPYYCVTSETKNALLVALSKVLGTCNSLTFRVFIRRPSVPHQNQYDVI

SEQ ID NO: 154 - protein, 915 aa, Otolemur garnettii
MESLKTASEMLYPEIIVEVGRVTFGEENRKKMTNNSLKRSENSKLTQAICALLNSGGGVIKAEADDKTYSYRCHGLGQDLETSFQKLLPSGSQKYLDYVQQGHHLLIFVKSWSLDDFSLPLRICSLHSNLYQRDVTSAINLSATSALELLREKESRAQRGGPRVKELHPQKVLSTYIQEEEDMKVSASEFFKKDRLKYKEKLNFTESTHVEFKRFTTKKVVPRTKEMLPHYISAFTNTQGGYLIIGVDDKSKEVFGCKKEKVNPDLLKKEIENCIERLPTFHFCCKKPKVNFTIKILNVYQKDVLYGYVCVVQVEPFCCVVFARAPDSWIVRNNSVTRLTAEEWVVMMLDLQSAPSSSATHYHSQLISSASSAPRSPAHPIKVLEFKQALQRRFFPVTQEEIQFKPESLCKKLFSDHEGLEELMKTQIHPCSQGIVIFSRSWASDVGLRREQNILCDALLIAVNSPLVLYTISLDPSWLGGLEYARNTAHQLKQKLQTVGGYTGKVGIIPKLMHLTSTQRSPGETPVHYPLSYSLADEDEMGNLLQALVVVCLCSRSFLSDQLGCEFFNLLIGEQSKLLSESLCETRELFIHCFPGTRKTALAIKIMEKIKDVFHCKPKEILYVCESDSLKDFVTQQTTCQAVTRKVFMQGEFLKIKHIVMDETENFCSKYGDWYMKARDITHPKVRGAGSESLHRGVLWIFLDPLQVHHTDVNGLPPPFAQFPRKTVASGIHRAWEIAMVLKEEMKRIKENPLSSISPEALALFSEAAYGEGMCAQALPGVYEVKTNMTPEQIANYVAGRCHSLFQHGYLPKDVAILCRREEDRGRYKLALLKAMNSIQTHGASGVVFSQATDVWGSHITLDSLRQFSGLERNIVFGISPECAQSEELHKLCFASRAINHLYLLYEKRAASERH

SEQ ID NO: 155 - protein, 890 aa, Ailuropoda melanoleuca
MSVKVDLETNFAECVLNAGKVILGNKQRNEMNPQLQKKQNKIIMNAICALLNSGGGVVKAEIENKDYNYEIHGVGLKMPSIFKGYLDEMQQGDLFLIFVRSWNAEASGVRLASLSSNLYHRYRTSNDVMNSQEALAFLKGRSQTLVNTNDSNSLSPQKVQVGVQNDGNIRASAAALFARTRLQFLEKLNFTKSLHVEFKMFSTEVSQCFDESLPSCVSAFANTEGGYIFFGVHDETSQVVGCEKEKIDLATLSQSIDNCIRKLPVHHFCTQRREIKYAVKFLQVHNQGVLHGYVCAVKVEQFCCAVFAKVPSSWQVKDNRVKRLATKEWIAWMMEADPDLSRFSEMVLALSLSSTTPRSRTVCTHKNFECLKEQQKRYFPVISDRVVYTPENLYKELFSKHKGLRDLINKEMRPFSQGILIFSRSWAVDLGLPEKKGVICDALLLSQNNIPLLYTILSECDASWKDNYTIVARTLKQKLVNTGGYTGKLCITPLVFLLNPDRTAKTLHGSDLQIYPESYNLKTTQHMETLLQSLVIVLLGFRSFLSEELGSEVLNILTDKQYELLSKNIRITRELFVHGLPGSGKTIVALRIMEKIRNVFHCQPSDILYICENQPLRKFVSKKNICQAVTRKTFMKNDFQKIQHIIIDEAQNFRTEDGDWYGKARNITQRENDCLGILWIFLDYFQTSHLSHNGLPALAAQYPREELTRVVRNADPIANYLQEVMQEVKGKPPPNIPLGSLEMIHKAKWAQGIPGNFEIMEYSDLEEMVVQVAEKCQFLFRNGYSPKDIAVLFSKASEVEKYKDKLLRAMRKRKLSQLNEESDLLVQIKDASDITANHIVLDSVRRFSGLERNIVFGFNPTAAEPAVFHNLLLCLASRAKKHLYILKVSI

SEQ ID NO: 156 - protein, 912 aa, Ailuropoda melanoleuca
MAGLQTDMEMLYPETVVHVGRVTFGEENRKKMTNHSLKKAENKKIIQATCALLNSGGGVIKAETDDKTYSYRCHGLGQDLETSFQKLLPSGSQKYLDYIQQGHTLLIFVKSWSPDVFSLPLRICSLRSNLYQRAVTSTVNLNACSALELLREKQSRAQRGRSGVKELSSQKVPDRDIQEEEDMRMSASELFQKDKLMYKEKLNFTESTHVEFKRFTTKKIVPRIKEMLPHYVSAFANTLGGYLIFGVDDKTKEVFGCKKEKVNPDLLKKEIENCIEKLPTFHFCCEKPQVHFTTKILNVYQKDVLYGYVCAVQVEPFCCVLFSETPDSWIMRDNSITRLTVEHWVAMMLGVQSATSSLTTNASFPLRAPAPSVLGSPSSPMKVLELKGPLQQRLFPVTREEIQFKPESLCKKLFSDHKGLKELMKTQIYPCSQGIVIFSRSWASDVGLRKEQDVLCDALLIAGNSPLVLYTILVNPSWDGGLEYARNTAHQLKQKLGTVGGYTGKVCVIPRPMYLPSIQHSPGEILIHYPQCYRLTTKEEMEDLLQALIVVSLYSRSLLSDQLGCEFFSLLIEEQCELLSESLQETRELFIHCFPGTRKTALAIKIMEKIKDLFQCKPKEILYVCESDSLKDYVSQQTTCQAVTRKTFLQGEFLKIKHIVMDETENFCSKYGDWYLKARSITHPKVRGAGSENLHRGILWIFLDPFQVRHADINGLPPPSAQFPRKTITSGIHCAREIAMVMKEEMKRIKGNPPPSMSPDTLSLFREAAYEEAVRAQALPGVCETETNLTMEQVVKRVAERCHDLFQCGYQPKDIAILCRKGEDRGRYELALLKAMELCETHGATKVVFSQASGVWGSHIILDSIQQFSGLERNIVFGLSPECTLSEEAHKLCFAARAIKHLYLLYEKRAAF

SEQ ID NO: 157 - protein, 902 aa, Sarcophilus harrisii
MNILDHLSLEPSSADLVINVGKVTLGEKNREKLAASQREQERNKIAIAACSLLNSGGGVICMEMADKHYFSKNMEIGQDLEKCLGNFVDPFPFQNYFSTLSQGEYYFIFVKSWGNRDSLEHSSIIPRICSQNVNLYERSGTRTLNMSPSMVSNFLKNKKRERAVKRAENSPPKKVLKVVNLDLEENDPVALVFQKDSLEREEVLPFSESMLVEFKQFSTKNIIKYIKETISKYIPAFANTEGGYLFIGVEDSTWKVKGGCKKIVKPDVLRKVIEKKIDDLPVEHFCSHRYPIKYKIKFLEVYDQGELYGYVSVVRVEPFCCVVFSEEPVSWFVKDRHINRLSTKEWMDMMLGADSDLSLLSENFDSQLSLNNCPPLNRPVYCKKNLKHKEALQERLFPVSPGEIKYNPDSLCQELFSEHEGLEELMKEQMCKEECSQGVLIFSRSWAVDVGLQKNQKVLCDALLIAANSFPVLYTVLREPFPYGEDYSSCTAFTLKQKLVNTGGYTERLCIIPRVLVLNSGRDSEIPRSPGQPILYPSLYKVTKQEITNLLQSLVIVLLSFRSFLSDLVGHEVLNLLTIEQYNVVSKNLHKSPKLFVHGFPGTGKTVIAMKMIEKIKNEFSCEKEEILYICENQPLMNFMRKKDICNAVTRKRFMLSTFKEVKHIIIDEAQNFREENGSWYDKAQEITQKNGVSQGILWIFLDYYQTSHADNSGLPSFQYPQEWLTKFVRNADPIADFIKQNMETIKTHLPINIPSGSLRMLDKACWSSGVPGVCEIRKNLTRQQIVARVAEECKKLFQMGYSSKNIAILVSTLKDIEDYEKLLNQATKKIRGLKICFNSEESNCIVLDSIRRFSGLERNIVFGLNPQTEVLDVSYNLLVCLASRALTHLYILYEGNGMVKF

SEQ ID NO: 158 - protein, 869 aa, Sarcophilus harrisii
METLQVDMETHYAEVVIDVESIILGEEDRKNMTNSHLKRTQNSKIIQAVCALLNSGGGIVRAEIFNRSYNYQCDGVGQDLETSFQKLLPLASQEFLDYLQQDHNLFIFVKPWIMKAAGPQLRICSLSSNIFQRDITCTVNLTASRALELLKEKQSKIQRGRENLPMWHPKKVLVSKIQEEENIRLFASEFFEKDQLLYKEKLNFTESTHVELKRFTTKKIVPRIKEMLPRYVSAFANTKGGYLIFGVDDKTNEVFGCKRDKVNPVILEKEIEYCIQKLPIFHFCSLKPKINFTTKIIDVYDNNNLCGYVCVVKVEPLCCVVFTEAPNSWIVRNNFVERLKTEEWVSRLMDIDPVTPQQIGFKPESLCKELFSEYNGLEKLMKKKTCQFSQGILIFSRSWAIDIGLRKDDRVLCDALLIAVNSPPILYTIIRGSDKMDGLEYSRHTALQLKQKLVNVGNYTGKVCIIPQLLHLPDLLCGIMQVPYPQSYVLTTEYELEDLLQSLVIVLLCFTSLLSDQLGCQFLKLLVAEQSKLLSQSLQKTRELFILCLPGTRKTAMVIKILEEIRSVFHCEAKEILYLCENDPLREFVSQQSTCQAETRKTFMRRDFPKIKHIVIDEAQNFHGEGGDWYTKAKNITHPKNDEAGRRNPHQGILWLFIDSFQASHLGVSGLPLSLMQYPRKNLTREIYNALEIAMIMKQEMKKIKENQHGHVAPESLALFREDMYEDAIHDYTLPGVCEIERDLTEDELANYVASRCQSLFQNGYSPKDIAILYSRNEDREHYELLLQTTMKSIKTHRIAEVELSRASDILGNSIILDSIQQFSGLERNIVFGLIPVYSGSEVPHNLLLCCASKAIKHLYVLYEKKEDL

SEQ ID NO: 159 - protein, 871 aa, Monodelphis domestica
MERLQVDIETHYAEVVVEVGSVTFGEEYRKRMTDSHLKRTQNSKIIRAICALLNSGGGVIKAEIENRSYNYQCDGLGQDLETSFQKLLPLASQNFLDYLQQDHSLFIFVKPWIMKAVGPQIRICSLSSNIFQRDVTCTVNLTASRALELLKEKQSRIQRGRENLPMWHPKKVLVSEIQEEEDMRVFASEFFKKDWLLYKEKLNFTESTHVELKRFTTKKILPRIKDMLPRYVSAFANTKGGYLIFGVDDKTNEVFGCQKDKVHPLQLQKDIQSCIEKLPIFHFCSGKPNINFTTKIIDVYDNDCLYGYVCVVKVEPICCIVFAEAPDSWIIRNNFVERLKPEEWVSQLMDIHPVTSQEIGFKPESLCQELFSEHYGLEKLMKKMTRHFSQGILIFSRSWAVDIGLRKDDRVLCDALLIAINSPPILYTIVRGSNQMDGFEYSRYTALQLKQKLANVGRYTGKVCIIPQLLHLPDPQSEIIPVRSYYPQAYVLAIDYELEDLLQSLVMVLLCFTSLLSDQLGCQFVSLLAGDQSKLLSKSLQETRELFILCLPGTRKTAMVIKILEEIRNIFHCEAKEILYLCENDSLREFVSQQSPCQTETRKTFMRSEFPKIKHIVIDEAQNFCSEDGDWYTKAKNITHPKDEKARRKNPHQGILWLFIDSFQASHSRVSGLPLPLMQYPRKNITREIYHAQEIAMVMKQEMKMIREKNQPQNMPPESLVLFREDLYEDAIQAYTLRGICERERNLTKEEMANWVVRRCQILFHNGYSPKDIAILYSRSEDREHYEFILQRTMKSIRTHRTTEVGFSRASDVLGSKIILDSIQQFSGLERNIVFGLIPFCPGPEVPHNLLLCFASKAIKHLYLLYEKEEL

SEQ ID NO: 160 - protein, 87 aa, Mustela putorius furo
EEAAHAQALPGVCETEANLTMEQIVKRVAERCHDLFQGGYRPKDIAILCRKREDRGRYEPALLKAMELFETRGATKVVFSQASGVGG

SEQ ID NO: 161 - protein, 13 aa, Homo sapiens
SAFANTEGGYVFF

SEQ ID NO: 162 - protein, 13 aa, Homo sapiens
PAFANTGGGYLFI

SEQ ID NO: 163 - protein, 13 aa, Homo sapiens
SAFANTDGGYLFI

SEQ ID NO: 164 - protein, 13 aa, Homo sapiens
SAFANTDGGYLFV

SEQ ID NO: 165 - protein, 13 aa, Homo sapiens
SAFANTEGGYLFI

SEQ ID NO: 166 - protein, 13 aa, Homo sapiens
SAFANTQGGYVLI

SEQ ID NO: 167 - protein, 13 aa, Pongo pygmaeus
SAFANTEGGYVFF

SEQ ID NO: 168 - protein, 13 aa, Pongo pygmaeus
SAFANTDGGYLFV

SEQ ID NO: 169 - protein, 13 aa, Pan troglodytes
SAFANTEGGYVFF

SEQ ID NO: 170 - protein, 13 aa, Pan troglodytes
PAFANTGGGYLFI

SEQ ID NO: 171 - protein, 13 aa, Pan troglodytes
SAFANTDGGYLFI

SEQ ID NO: 172 - protein, 13 aa, Pan troglodytes
SAFANTEGGYLFI

SEQ ID NO: 173 - protein, 13 aa, Macaca mulatta
SALANTEGGYVFF

SEQ ID NO: 174 - protein, 13 aa, Macaca mulatta
SAFANTDGGYLFI

SEQ ID NO: 175 - protein, 13 aa, Macaca mulatta
SAFANTDGGYLFV

SEQ ID NO: 176 - protein, 13 aa, Macaca mulatta
SAFANTQGGYVLI

SEQ ID NO: 177 - protein, 13 aa, Bos primigenius
PAFANTEGGYLVI

SEQ ID NO: 178 - protein, 13 aa, Bos primigenius
SAFANTHGGYLII

SEQ ID NO: 179 - protein, 13 aa, Equus caballus
SAFANTEGGFVFF

SEQ ID NO: 180 - protein, 13 aa, Equus caballus
PAFANTEGGYLFI

SEQ ID NO: 181 - protein, 13 aa, Equus caballus
PAFANSGGGYLFI

SEQ ID NO: 182 - protein, 13 aa, Canis lupus
SAFANTLGGYLIL

SEQ ID NO: 183 - protein, 13 aa, Mus musculus
SAFANTDGGYLFI

SEQ ID NO: 184 - protein, 13 aa, Mus musculus
SAFANTDGGFLFI

SEQ ID NO: 185 - protein, 13 aa, Mus musculus
SAFANTDGGFLFI

SEQ ID NO: 186 - protein, 13 aa, Mus musculus
SAFANTDGGYLFI

SEQ ID NO: 187 - protein, 13 aa, Mus musculus
SALANSEGGYVFF

SEQ ID NO: 188 - protein, 13 aa, Mus musculus
SAFANTQGGYLFI

SEQ ID NO: 189 - protein, 13 aa, Mus musculus
SAFANTQGGYLFI

SEQ ID NO: 190 - protein, 13 aa, Mus musculus
SAFANTQGGYLFI

SEQ ID NO: 191 - DNA, 59 bp, Artificial Sequence
  Synthetic
ccggcagtctttgagagagcttattctcgagaataagctctctcaaagactgttttttg

SEQ ID NO: 192 - DNA, 30 bp, Artificial Sequence
  Synthetic
gagcagaagctgatcagcgaggaggacctg

SEQ ID NO: 193 - DNA, 13 bp, Artificial Sequence
  Synthetic
caccatggtgagc

SEQ ID NO: 194 - DNA, 59 bp, Artificial Sequence
  Synthetic
ccgggctcagaatttccgtactgaactcgagttcagtacggaaattctgagcttttttg

SEQ ID NO: 195 - DNA, 58 bp, Artificial Sequence
  Synthetic
ccggtgaagaactaacccgggacttctcgagaagtcccgggttagttcttcatttttg

SEQ ID NO: 196 - DNA, 21 bp, Artificial Sequence
  Synthetic
caagcctgtgtgcattcataa

SEQ ID NO: 197 - DNA, 21 bp, Artificial Sequence
  Synthetic
aaggcctggaacataaaaagg

SEQ ID NO: 198 - DNA, 20 bp, Artificial Sequence
  Synthetic
ctttgttcaacacgccaaga

SEQ ID NO: 199 - DNA, 21 bp, Artificial Sequence
  Synthetic
gagaaaatgatggacgcagat

SEQ ID NO: 200 - DNA, 25 bp, Artificial Sequence
  Synthetic
gaaagtcagtttctgaggaatttca

SEQ ID NO: 201 - DNA, 20 bp, Artificial Sequence
  Synthetic
ggtggtcatgatgctggata

SEQ ID NO: 202 - DNA, 20 bp, Artificial Sequence
  Synthetic
tggtggcagaagaggaagat

SEQ ID NO: 203 - DNA, 20 bp, Artificial Sequence
  Synthetic
gctggcccatagtgatcttt

SEQ ID NO: 204 - DNA, 20 bp, Artificial Sequence
  Synthetic
ggatgcgtgcatttatcaga

SEQ ID NO: 205 - DNA, 21 bp, Artificial Sequence
  Synthetic
ctggagttgtcccaattcttg

SEQ ID NO: 206 - DNA, 18 bp, Artificial Sequence
  Synthetic
cagcagaacacccccatc

SEQ ID NO: 207 - DNA, 18 bp, Artificial Sequence
  Synthetic
aggtcttcccgacgatga

SEQ ID NO: 208 - DNA, 26 bp, Artificial Sequence
  Synthetic
tgcatgggtaaaagtagtagaagaga

SEQ ID NO: 209 - DNA, 27 bp, Artificial Sequence
  Synthetic
tctggagtatataccactctgtctgaa

SEQ ID NO: 210 - DNA, 24 bp, Artificial Sequence
  Synthetic
ggagtatatcgcaaatatcctggt

SEQ ID NO: 211 - DNA, 20 bp, Artificial Sequence
  Synthetic
atgcagtgtccaagcagaaa

SEQ ID NO: 212 - DNA, 20 bp, Artificial Sequence
  Synthetic
agactcaaaggcctcagcaa

SEQ ID NO: 213 - DNA, 22 bp, Artificial Sequence
  Synthetic
ccagctcagcatagtttgtgtc

SEQ ID NO: 214 - DNA, 22 bp, Artificial Sequence
  Synthetic
tgatgaaatcaggcaagagttg

SEQ ID NO: 215 - DNA, 25 bp, Artificial Sequence
  Synthetic
ccaaggaattcttattgttctcact

SEQ ID NO: 216 - DNA, 21 bp, Artificial Sequence
  Synthetic
cttcacacgccaagaaacagt

SEQ ID NO: 217 - DNA, 20 bp, Artificial Sequence
  Synthetic
gttgatagggcagacgttcg

SEQ ID NO: 218 - DNA, 20 bp, Artificial Sequence
  Synthetic
tcaccctctccactgacaga

SEQ ID NO: 219 - DNA, 20 bp, Artificial Sequence
  Synthetic
tgggtgctcaggtagtggtt

SEQ ID NO: 220 - DNA, 20 bp, Artificial Sequence
  Synthetic
gtctttccgtgctccaaaac

SEQ ID NO: 221 - DNA, 23 bp, Artificial Sequence
  Synthetic
tgataatgctgaaaacatgggta
